United States Patent Application Publication US 2024/0141434 A1 - sequence listing, part 3

SEQ ID NO: 19377 - DNA, 122 bp, Homo sapiens
  misc_feature (61)..(62): /note="This region represents a CpG dinucleotide"
  misc_feature (61)..(61): /note="Nucleotide may be methylated to form 5-methylcytosine"
ggccggggaatgggagggtgtcagagagctcactggtacttgttcctgcattctgtctcccgctcgctcacagtcacaggtggttttctcatctaagctggctgcagatactcctgtgggag

SEQ ID NO: 19378 - DNA, 122 bp, Homo sapiens
  misc_feature (61)..(62): /note="This region represents a CpG dinucleotide"
  misc_feature (61)..(61): /note="Nucleotide may be methylated to form 5-methylcytosine"
tcctctttgtcgctgagaatatttcgttgtgtggatctaccagtgtgtttatcccttccccgctcaggcctgtttgggtggtttccagtttggggcgatgacaaatacaggcactaacaaac

SEQ ID NO: 19379 - DNA, 122 bp, Homo sapiens
  misc_feature (61)..(62): /note="This region represents a CpG dinucleotide"
  misc_feature (61)..(61): /note="Nucleotide may be methylated to form 5-methylcytosine"
ttgttacagtgacattcacgtggcatacaaacacccattttagatgcaatggctttagcacgttcacgatgttatgccacctccacctcagtctagtttcagaacattctcaccacccctaa

SEQ ID NO: 19380 - DNA, 122 bp, Homo sapiens
  misc_feature (61)..(62): /note="This region represents a CpG dinucleotide"
  misc_feature (61)..(61): /note="Nucleotide may be methylated to form 5-methylcytosine"
aatgtacattagtaatgacattattaaaactgttttgtttaaaatgaactttcacactagcgtgttgcaaagcggcacaaacaaatctatgtgatttcactagagatggtttaaaaagcttg

SEQ ID NO: 19381 - DNA, 122 bp, Homo sapiens
  misc_feature (61)..(62): /note="This region represents a CpG dinucleotide"
  misc_feature (61)..(61): /note="Nucleotide may be methylated to form 5-methylcytosine"
agtttgcatgcttgactacccctgctgaggaactgaaatgatatggcttacctaaggccacgtaacatgactaaataaggtaaaatgacacacctaacagggcccaaggtttagtcagagga

SEQ ID NO: 19382 - DNA, 122 bp, Homo sapiens
  misc_feature (61)..(62): /note="This region represents a CpG dinucleotide"
  misc_feature (61)..(61): /note="Nucleotide may be methylated to form 5-methylcytosine"
atcctggttctgatttttctcaaatcagagaagacaaggggacaaagacatttaatcccacggaacctcatgtcagtctcactaagtaaccagggcttcagaggatgccactagtccttgct

SEQ ID NO: 19383 - DNA, 122 bp, Homo sapiens
  misc_feature (61)..(62): /note="This region represents a CpG dinucleotide"
  misc_feature (61)..(61): /note="Nucleotide may be methylated to form 5-methylcytosine"
tgtctcctgctcccgttttctcggccgccccaggtacttttccagccacctctcctgctgcggcgcccccagccccgccacttctgcgcctcctcagctattgctgtcctttgactactcgg

SEQ ID NO: 19384 - DNA, 122 bp, Homo sapiens
  misc_feature (61)..(62): /note="This region represents a CpG dinucleotide"
  misc_feature (61)..(61): /note="Nucleotide may be methylated to form 5-methylcytosine"
gccctgcccttaggcatcagggattttccaagtttgattctcctgtcatcagaagcatcccgggaaggatgctcgttacactgcagattccagccaggcgcggaggctcacgcctgtaatcc

SEQ ID NO: 19385 - DNA, 122 bp, Homo sapiens
  misc_feature (61)..(62): /note="This region represents a CpG dinucleotide"
  misc_feature (61)..(61): /note="Nucleotide may be methylated to form 5-methylcytosine"
ttttgactcacaactggctctgccccacctctgtaccttgaacacagacataatggctaccggcatgacagctatcttgtgaccatgatgggacaagcaaaagcacactaaggatgatggaa

SEQ ID NO: 19386 - DNA, 122 bp, Homo sapiens
  misc_feature (61)..(62): /note="This region represents a CpG dinucleotide"
  misc_feature (61)..(61): /note="Nucleotide may be methylated to form 5-methylcytosine"
ctttgccggaagccggtcctgctggccaggtgttttacgtcagcagggaaatgtggcacacgccctcgaggcattttaacactgcgcttcaggaaatctcaagttccatcttgtgttagtaa

SEQ ID NO: 19387 - DNA, 122 bp, Homo sapiens
  misc_feature (61)..(62): /note="This region represents a CpG dinucleotide"
  misc_feature (61)..(61): /note="Nucleotide may be methylated to form 5-methylcytosine"
gctattgagacatgatttcagtgaataatattttccagacagagtttaataagcagcttgcggttgagtagcctttagcccaaaaaagggaaccaggtctctgtgactaccttctacattca

SEQ ID NO: 19388 - DNA, 122 bp, Homo sapiens
  misc_feature (61)..(62): /note="This region represents a CpG dinucleotide"
  misc_feature (61)..(61): /note="Nucleotide may be methylated to form 5-methylcytosine"
cccggcaagaatactggtttggtaaatcaacagagtctgaatgccactgaaaacctcccccggagtgagtcaccaactcagagcttcagaaaaacgtcctctcccagtgatatgacagcact

SEQ ID NO: 19389 - DNA, 122 bp, Homo sapiens
  misc_feature (61)..(62): /note="This region represents a CpG dinucleotide"
  misc_feature (61)..(61): /note="Nucleotide may be methylated to form 5-methylcytosine"
ttagcagaacacaattttggactcttacttggtgtgagcaagactacacagagaagttgccgaaaacagctttctgcacagcagggaatgcttgaagacaaaatggggaggaagaagcaaac

SEQ ID NO: 19390 - DNA, 122 bp, Homo sapiens
  misc_feature (61)..(62): /note="This region represents a CpG dinucleotide"
  misc_feature (61)..(61): /note="Nucleotide may be methylated to form 5-methylcytosine"
tggcagtggaaaacatctgggtgatctccacccaacccccacgcctgctcagccttcctccgggtcaggccaggtcagctgttctgcccaagctacaggcacagctgctagcccactgctgt

SEQ ID NO: 19391 - DNA, 122 bp, Homo sapiens
  misc_feature (61)..(62): /note="This region represents a CpG dinucleotide"
  misc_feature (61)..(61): /note="Nucleotide may be methylated to form 5-methylcytosine"
ttgagtggaaataggaactttcccaatgaaggcagctgaacagacggcattaagcaaaaacgtttcaaatctaatggcccattagtcacactcaaccgatgatccattgaaatgactgacca

SEQ ID NO: 19392 - DNA, 122 bp, Homo sapiens
  misc_feature (61)..(62): /note="This region represents a CpG dinucleotide"
  misc_feature (61)..(61): /note="Nucleotide may be methylated to form 5-methylcytosine"
ggaagactcacccatctgagtagggaataaatataggataaattgttggcagaaagctttcgatcggatgaattttctctgagcgaaaagccaagctttctctaagtcatttttacccacat

SEQ ID NO: 19393 - DNA, 122 bp, Homo sapiens
  misc_feature (61)..(62): /note="This region represents a CpG dinucleotide"
  misc_feature (61)..(61): /note="Nucleotide may be methylated to form 5-methylcytosine"
cagtgagtactcaataaatagcagctacatcattatcacggctattcttacttgctagtgcgttcgggctgtcatctccctgtgcctactttacagtcatctccattgtgataattaccctg

SEQ ID NO: 19394 - DNA, 122 bp, Homo sapiens
  misc_feature (61)..(62): /note="This region represents a CpG dinucleotide"
  misc_feature (61)..(61): /note="Nucleotide may be methylated to form 5-methylcytosine"
cttggcacatcagaagccacctgctgccaaccctatgagcaactgaggaaaggtgcctcacgccaccttcctaaagccagaatttgtgtcagattgtagggcaacctagaacctacagggaa

SEQ ID NO: 19395 - DNA, 122 bp, Homo sapiens
  misc_feature (61)..(62): /note="This region represents a CpG dinucleotide"
  misc_feature (61)..(61): /note="Nucleotide may be methylated to form 5-methylcytosine"
ctcctccatcactagttctgtttttttacgagggtgtgagccagaagacagcagccttgccggaaggcagagtttgtggtcagaccgtgtctacagcacctcatttcatccttcccaccacc

SEQ ID NO: 19396 - DNA, 122 bp, Homo sapiens
  misc_feature (61)..(62): /note="This region represents a CpG dinucleotide"
  misc_feature (61)..(61): /note="Nucleotide may be methylated to form 5-methylcytosine"
acagtggcctcagggtgtccagaattcctacgtggggactcagagcaccaacaactaatgcgtcatggtattttatgacctactgacctagcatctcttccactgtgctctactggctgtag

SEQ ID NO: 19397 - DNA, 122 bp, Homo sapiens
  misc_feature (61)..(62): /note="This region represents a CpG dinucleotide"
  misc_feature (61)..(61): /note="Nucleotide may be methylated to form 5-methylcytosine"
ggatgctgtctggctagtgatccatgagtcaacctcacctaacttttcactaaaaaccaacgtcaattcacacacaaaattagatcataacacataagaacttcaaaaatgaagactgacaa

SEQ ID NO: 19398 - DNA, 122 bp, Homo sapiens
  misc_feature (61)..(62): /note="This region represents a CpG dinucleotide"
  misc_feature (61)..(61): /note="Nucleotide may be methylated to form 5-methylcytosine"
caccctcaccccgtgggctccgggacccctcgactagctccatcacccattccgactacccgccctacgctccacctcttgacccgtcatcaccgaccggggggcgggactgcccgactttt

SEQ ID NO: 19399 - DNA, 122 bp, Homo sapiens
  misc_feature (61)..(62): /note="This region represents a CpG dinucleotide"
  misc_feature (61)..(61): /note="Nucleotide may be methylated to form 5-methylcytosine"
atttattgaggagctgccttgtgctatatacggatggtatggtggtagggcctgctttcacggacttagatttaagcaggggagaagtctagtaggaaacatatacctgagtgtctcatcat

SEQ ID NO: 19400 - DNA, 122 bp, Homo sapiens
  misc_feature (61)..(62): /note="This region represents a CpG dinucleotide"
  misc_feature (61)..(61): /note="Nucleotide may be methylated to form 5-methylcytosine"
gaacacaaaaataaataagacatgattcctgccctggggagctcacattgctggtggggacgtagctgtgtacaaagataatgacagtgccaggtggtaagtgctatggagaagggtgtgta

SEQ ID NO: 19401 - DNA, 122 bp, Homo sapiens
  misc_feature (61)..(62): /note="This region represents a CpG dinucleotide"
  misc_feature (61)..(61): /note="Nucleotide may be methylated to form 5-methylcytosine"
acaaagtgaagggcagtggctttgtggcaggattttcctcctctggtctgaagctttgtccgccggctttgaggggcatggctttatgccagatggctgtggtagcagtcttgactaactgc

SEQ ID NO: 19402 - DNA, 122 bp, Homo sapiens
  misc_feature (61)..(62): /note="This region represents a CpG dinucleotide"
  misc_feature (61)..(61): /note="Nucleotide may be methylated to form 5-methylcytosine"
caaaatgcaagccacacaaaaacacacccttgtggctttgtttttcctcctatagagttgcggggactcactgcaataggaagataagctgaatggccaaatgggcctaccagatttgaata

SEQ ID NO: 19403 - DNA, 122 bp, Homo sapiens
  misc_feature (61)..(62): /note="This region represents a CpG dinucleotide"
  misc_feature (61)..(61): /note="Nucleotide may be methylated to form 5-methylcytosine"
gctggtgactggtcatgcaccattggcagggcctggagcacgtgcaaggaacagagttcccggctctgcacactcaacatgtgtgtttcatactgtcacctggctggctcctctttctgggt

SEQ ID NO: 19404 - DNA, 122 bp, Homo sapiens
  misc_feature (61)..(62): /note="This region represents a CpG dinucleotide"
  misc_feature (61)..(61): /note="Nucleotide may be methylated to form 5-methylcytosine"
cctggcggcttttgttggccgcgtgctaatagccagggcttaaaagttttccatcttgagcggcaatcagctttcttcctctccatctctggccaaagccccctcgtccctgggacgcgctg

SEQ ID NO: 19405 - DNA, 122 bp, Homo sapiens
  misc_feature (61)..(62): /note="This region represents a CpG dinucleotide"
  misc_feature (61)..(61): /note="Nucleotide may be methylated to form 5-methylcytosine"
agctgcagcttgtcatatattagtcaattatcctaatgattttttccccactaaaaagcacgaatccaggttgctcttatattttattaagattttactttgtctactcacaaatattaatt

SEQ ID NO: 19406 - DNA, 122 bp, Homo sapiens
  misc_feature (61)..(62): /note="This region represents a CpG dinucleotide"
  misc_feature (61)..(61): /note="Nucleotide may be methylated to form 5-methylcytosine"
tacagtgggagtagttatctgaggcaagtgcattaaaaattagagagttgtaactggtaacggcattttgataaagggatattgaagagtttacttatgttaatggtattctgcaaatgttt

SEQ ID NO: 19407 - DNA, 122 bp, Homo sapiens
  misc_feature (61)..(62): /note="This region represents a CpG dinucleotide"
  misc_feature (61)..(61): /note="Nucleotide may be methylated to form 5-methylcytosine"
aataaacagccacactaacaggcagtataacaaaggaaaggcaacataatattcctcaaacggagttaagatagaccagatcttagaataactcagccatgactaaaattgggctcacaatg

SEQ ID NO: 19408 - DNA, 122 bp, Homo sapiens
  misc_feature (61)..(62): /note="This region represents a CpG dinucleotide"
  misc_feature (61)..(61): /note="Nucleotide may be methylated to form 5-methylcytosine"
ccatttcctgttggctgagcaatgagcatgccacagggccaatcagctctaaatgcaaggcggtgcatggccagaggaaagttcctgctgtctctccttcaccctgacagccatggccccaa

SEQ ID NO: 19409 - DNA, 122 bp, Homo sapiens
  misc_feature (61)..(62): /note="This region represents a CpG dinucleotide"
  misc_feature (61)..(61): /note="Nucleotide may be methylated to form 5-methylcytosine"
gattaatatttgttcggtaagaacagctccaggttcaggccggggggctccaggttcaagcgcctcttgtttactcacccatggcctgtgtggttccagggaggtcccatgggtgctgatcg

SEQ ID NO: 19410 - DNA, 122 bp, Homo sapiens
  misc_feature (61)..(62): /note="This region represents a CpG dinucleotide"
  misc_feature (61)..(61): /note="Nucleotide may be methylated to form 5-methylcytosine"
actcagcaggcagctggagaggaggtttctggcaggcgggagaaaggacccagaatggagcgtgatttgtgtgtcactaggaggaaagtgaagcgagagctccagatacttctcctctggaa

SEQ ID NO: 19411 - DNA, 122 bp, Homo sapiens
  misc_feature (61)..(62): /note="This region represents a CpG dinucleotide"
  misc_feature (61)..(61): /note="Nucleotide may be methylated to form 5-methylcytosine"
gtctctatagagccgctgatttatgactgcaacctgaagttggtgtggcagtcctccaggcgcgcctccctgcctgctcccagcctcctctttgcccacctgattggcagggggcagtggct

SEQ ID NO: 19412 - DNA, 122 bp, Homo sapiens
  misc_feature (61)..(62): /note="This region represents a CpG dinucleotide"
  misc_feature (61)..(61): /note="Nucleotide may be methylated to form 5-methylcytosine"
aaaaattagccaggtgtgatggtgtgtgcctatagtccccactatccaggaggctaagcccggagggttgcttgagcttgggtggttgaggctgcagtgagctgtgattgcgccactgcact

SEQ ID NO: 19413 - DNA, 122 bp, Homo sapiens
  misc_feature (61)..(62): /note="This region represents a CpG dinucleotide"
  misc_feature (61)..(61): /note="Nucleotide may be methylated to form 5-methylcytosine"
atcagacacatctcatctctaaacctttccctgcagatcaccatctgagtcatgacttcccgtcgtttgtcttcagtgatctggttggtgcaaacgtatgaggtgactggaattccttagcc

SEQ ID NO: 19414 - DNA, 122 bp, Homo sapiens
  misc_feature (61)..(62): /note="This region represents a CpG dinucleotide"
  misc_feature (61)..(61): /note="Nucleotide may be methylated to form 5-methylcytosine"
ataaaaggaggtggttggcaagatgacttgagaccctttctactcagaaactgttactctcgtgttatctgccccagtggtctaggggtaggtattatggttttttagactgactggataaa

SEQ ID NO: 19415 - DNA, 122 bp, Homo sapiens
  misc_feature (61)..(62): /note="This region represents a CpG dinucleotide"
  misc_feature (61)..(61): /note="Nucleotide may be methylated to form 5-methylcytosine"
caccattgataacaggcttgatcacatgacagagggagtgattgtcagacttctccatggcgaagttactcaaaggatgcattccaatcactgagatggaaggggcagtaccccctggcagt

SEQ ID NO: 19416 - DNA, 122 bp, Homo sapiens
  misc_feature (61)..(62): /note="This region represents a CpG dinucleotide"
  misc_feature (61)..(61): /note="Nucleotide may be methylated to form 5-methylcytosine"
aagcagataatacaatccaggaaacatgagcaccagaacataatgccacattcaaaacaacgtcatgctgacatcacacaatggcaccactcacagtcacttttactttccccaagggatag

SEQ ID NO: 19417 - DNA, 122 bp, Homo sapiens
  misc_feature (61)..(62): /note="This region represents a CpG dinucleotide"
  misc_feature (61)..(61): /note="Nucleotide may be methylated to form 5-methylcytosine"
aataagacctggggacaaaagggatctgctggattagagatactgaaattcatgtgaaggcgagctaagagagaaccacaggtaggcacttaggagcagtacaacaggtctggaggcaccca

SEQ ID NO: 19418 - DNA, 122 bp, Homo sapiens
  misc_feature (61)..(62): /note="This region represents a CpG dinucleotide"
  misc_feature (61)..(61): /note="Nucleotide may be methylated to form 5-methylcytosine"
tattgagcttcacaccccagtccactggcatcatgtaagaaacaactcattacactctaacggtagtttagtgaaatggatgagtagtcttagtctgcctcctcaggctgcaacagaaagtc

SEQ ID NO: 19419 - DNA, 122 bp, Homo sapiens
  misc_feature (61)..(62): /note="This region represents a CpG dinucleotide"
  misc_feature (61)..(61): /note="Nucleotide may be methylated to form 5-methylcytosine"
tatgtcaaagcttctccaattgtatactttaaccatgtgcaattcattatatggcaattacgcctcaataaagctggttttaagaagaaaaattatcagagggcttacactatttcaattgg

SEQ ID NO: 19420 - DNA, 122 bp, Homo sapiens
  misc_feature (61)..(62): /note="This region represents a CpG dinucleotide"
  misc_feature (61)..(61): /note="Nucleotide may be methylated to form 5-methylcytosine"
ccaatggtgtttgctaacagtaagtccttatctgtagaattctttaaggcagatgtacctcgtttatatgagtgtctaggattgcttatggtaaataaatatggaaatctacacatttacag

SEQ ID NO: 19421 - DNA, 122 bp, Homo sapiens
  misc_feature (61)..(62): /note="This region represents a CpG dinucleotide"
  misc_feature (61)..(61): /note="Nucleotide may be methylated to form 5-methylcytosine"
cctaactcatcctctgggtcatgctcctcacaatgcaccaggaccctcctgcccccacgtcggatgttgctcactgcacgcattttaaacaggcactgctattatcctcctcctacagagaa

SEQ ID NO: 19422 - DNA, 122 bp, Homo sapiens
  misc_feature (61)..(62): /note="This region represents a CpG dinucleotide"
  misc_feature (61)..(61): /note="Nucleotide may be methylated to form 5-methylcytosine"
cccaagcaaacctcccacctcagcctcccgagtatctgggatcacaggcatgtgccaccacgcctgactaatttaaaaaacttttttgtacagatggggtcttgctatgtggcccaggctgg

SEQ ID NO: 19423 - DNA, 122 bp, Homo sapiens
  misc_feature (61)..(62): /note="This region represents a CpG dinucleotide"
  misc_feature (61)..(61): /note="Nucleotide may be methylated to form 5-methylcytosine"
ggactgtggctttatccctgaggccaggcttcatgtccagatggccatgccagaggttgacgtggcagagaaggagtgtgacacaggccagtggagcgagtggagccagcctgtgtgcttcc

SEQ ID NO: 19424 - DNA, 122 bp, Homo sapiens
  misc_feature (61)..(62): /note="This region represents a CpG dinucleotide"
  misc_feature (61)..(61): /note="Nucleotide may be methylated to form 5-methylcytosine"
gaagttacacaaccagtgagaaaggaatcttccctgggcaatgagatgagggctgactcacgatctcagctcttaggaatggctctccagctgctgacagaggccacatgggttcagccatg

SEQ ID NO: 19425 - DNA, 122 bp, Homo sapiens
  misc_feature (61)..(62): /note="This region represents a CpG dinucleotide"
  misc_feature (61)..(61): /note="Nucleotide may be methylated to form 5-methylcytosine"
atttctaaatgactcaaaaacaactctcagaaacttaggaggccaataagcactgaaacacgttctttccatcagcagagagggcttagaggactctccaaacaacatcctctctcacccta

SEQ ID NO: 19426 - DNA, 122 bp, Homo sapiens
  misc_feature (61)..(62): /note="This region represents a CpG dinucleotide"
  misc_feature (61)..(61): /note="Nucleotide may be methylated to form 5-methylcytosine"
caccccagagacctcacctggagtcttctctggctcaaccttgatttgagggtaaggcagcggtacatgtgtagtagcaggtcagaaaatgggagaaaagagcactgggcctctggacccaa

SEQ ID NO: 19427 - DNA, 122 bp, Homo sapiens
  misc_feature (61)..(62): /note="This region represents a CpG dinucleotide"
  misc_feature (61)..(61): /note="Nucleotide may be methylated to form 5-methylcytosine"
tagcaggagggtttgcttgtcaacagatttcagtattgtcagcaacatccaataaactaacggtaatagcagcaataagtattaacagaatggccacacatggcatgttatctcactgaatc

SEQ ID NO: 19428 - DNA, 122 bp, Homo sapiens
  misc_feature (61)..(62): /note="This region represents a CpG dinucleotide"
  misc_feature (61)..(61): /note="Nucleotide may be methylated to form 5-methylcytosine"
attattctaagatataaacacttaattttattcatgctcttgaattactttcctttctaccgcatgtttgtgtagctgttatatgagtcctttctactgatgtagctgtcattccttcaact

SEQ ID NO: 19429 - DNA, 122 bp, Homo sapiens
  misc_feature (61)..(62): /note="This region represents a CpG dinucleotide"
  misc_feature (61)..(61): /note="Nucleotide may be methylated to form 5-methylcytosine"
gacatcaccagtgcaatttgaagcagtaacatcctcagggcaccccaagccacaggctgacgtatggtggccaacgtctaaatgttgacacctgacctgggggaggggtgtcttgtattctg

SEQ ID NO: 19430 - DNA, 122 bp, Homo sapiens
  misc_feature (61)..(62): /note="This region represents a CpG dinucleotide"
  misc_feature (61)..(61): /note="Nucleotide may be methylated to form 5-methylcytosine"
gtcgtgctgtatgtaaagtgtagctctctccagcctgcatcttccagtgtcttctggggacgtttactgtttgactcaaccagatgtgatctcttctatttgagtccttctactctgactgc

SEQ ID NO: 19431 - DNA, 122 bp, Homo sapiens
  misc_feature (61)..(62): /note="This region represents a CpG dinucleotide"
  misc_feature (61)..(61): /note="Nucleotide may be methylated to form 5-methylcytosine"
tcaattgccccttcatctcagagcagttagttctctgctaactctaggcaggaaacaggccggacagtggttacgaacttccaagattacagactgcctccatgactaagagactgctcagc

SEQ ID NO: 19432 - DNA, 122 bp, Homo sapiens
  misc_feature (61)..(62): /note="This region represents a CpG dinucleotide"
  misc_feature (61)..(61): /note="Nucleotide may be methylated to form 5-methylcytosine"
ggacttcactttcttttcttttcttctttttaacctttgcctcttcttctaggagaacttcgctttctacactgattataatttagacatcttcccagtagggctgaatcctagaccaatct

SEQ ID NO: 19433 - DNA, 122 bp, Homo sapiens
  misc_feature (61)..(62): /note="This region represents a CpG dinucleotide"
  misc_feature (61)..(61): /note="Nucleotide may be methylated to form 5-methylcytosine"
tccctccccttctcccctcaccagattcttatgtggtttcccagagatattctaggtatacgcagcaaatgtatatcaacatgttttcacttcccccactcccacaccctccccctttcttt

SEQ ID NO: 19434 - DNA, 122 bp, Homo sapiens
  misc_feature (61)..(62): /note="This region represents a CpG dinucleotide"
  misc_feature (61)..(61): /note="Nucleotide may be methylated to form 5-methylcytosine"
aatgttgggcctcctcctatgtggttttcctgaattcttgatgcaacctagaagaactaacgttaaaaagtaaagagcacagtacagacagtaagagttctgtttgtgaagactaatacagg

SEQ ID NO: 19435 - DNA, 122 bp, Homo sapiens
  misc_feature (61)..(62): /note="This region represents a CpG dinucleotide"
  misc_feature (61)..(61): /note="Nucleotide may be methylated to form 5-methylcytosine"
ctataacacagtgttacacagatctctagaacttgtttatcttgcataactgaatctttacgtccattgagcaacaactctctgaaattccacctcccatgagcccctgggaactaccattc

SEQ ID NO: 19436 - DNA, 122 bp, Homo sapiens
  misc_feature (61)..(62): /note="This region represents a CpG dinucleotide"
  misc_feature (61)..(61): /note="Nucleotide may be methylated to form 5-methylcytosine"
tggagtttgagctgcccattaggcatcaatgatgagtaagcagttgggaaaagttaagggcggaggttggagttgaaaataaaactttgggcatcatcaccatataactggtatttaaagcc

SEQ ID NO: 19437 - DNA, 122 bp, Homo sapiens
  misc_feature (61)..(62): /note="This region represents a CpG dinucleotide"
  misc_feature (61)..(61): /note="Nucleotide may be methylated to form 5-methylcytosine"
tatacctcaactagctctagtgaggtcagaatgactaacatcatcaaacctaggattacacgaaccttaaatcccaggaggtgtgggcagccattagtcagagtattcaactttattcacaa

SEQ ID NO: 19438 - DNA, 122 bp, Homo sapiens
  misc_feature (61)..(62): /note="This region represents a CpG dinucleotide"
  misc_feature (61)..(61): /note="Nucleotide may be methylated to form 5-methylcytosine"
taaatttaaaatacataaattactttaatccaaccaagacttttatttccacgttcatgccgtgggtataatgttaacaatgaagggcactagcaagagatttctgggtttttctccccttt

SEQ ID NO: 19439 - DNA, 122 bp, Homo sapiens
  misc_feature (61)..(62): /note="This region represents a CpG dinucleotide"
  misc_feature (61)..(61): /note="Nucleotide may be methylated to form 5-methylcytosine"
gcccaggagacaagatgggttgcatgggtcacagtagcaggaggagccgagcggtggggccgggactcagggacgacggcagggcccgaactccatctgtcctgtgttcacgtacacagtgc

SEQ ID NO: 19440 - DNA, 122 bp, Homo sapiens
  misc_feature (61)..(62): /note="This region represents a CpG dinucleotide"
  misc_feature (61)..(61): /note="Nucleotide may be methylated to form 5-methylcytosine"
atcaacctttctctctctctctctctcacacacacgcacacacacacaaaatctgaaacacggttaagaaacttcattgggctacccggaagataattcagtaaggaagtggttatgaaaat

SEQ ID NO: 19441 - DNA, 122 bp, Homo sapiens
  misc_feature (61)..(62): /note="This region represents a CpG dinucleotide"
  misc_feature (61)..(61): /note="Nucleotide may be methylated to form 5-methylcytosine"
ctcccctaacccacgtgaaatttggtttggatgttgagactgatgatgctatctgcacaccgagaaggcatgaaaagatttgtgactcatgtaatgagccattctggggagagtacagcagg

SEQ ID NO: 19442 - DNA, 122 bp, Homo sapiens
  misc_feature (61)..(62): /note="This region represents a CpG dinucleotide"
  misc_feature (61)..(61): /note="Nucleotide may be methylated to form 5-methylcytosine"
tcaggagagcccatcagctgctcactaatgtgaagtcacagtcaagtgtggggactgagtcggatgaggctgacttctaggcagcttgtctgacaacaggttatgcagtgtatctaaggaca

SEQ ID NO: 19443 - DNA, 122 bp, Homo sapiens
  misc_feature (61)..(62): /note="This region represents a CpG dinucleotide"
  misc_feature (61)..(61): /note="Nucleotide may be methylated to form 5-methylcytosine"
cccatgggaatctgcccttctcctgaagctctgcactactgaatacctccaccttgcatgcgatgggtgttcagtaaagacctgttgccagagtggatgttctgttcattcttacacatgga

SEQ ID NO: 19444 - DNA, 122 bp, Homo sapiens
  misc_feature (61)..(62): /note="This region represents a CpG dinucleotide"
  misc_feature (61)..(61): /note="Nucleotide may be methylated to form 5-methylcytosine"
aaaggaccagtaacttctgctgctgatgtagctgccacagggattagggctggtgaggcacgtgtttaagtctcaggttccttaatgccagatgtgtagtctcagtcaatttcctcatttct

SEQ ID NO: 19445 - DNA, 122 bp, Homo sapiens
  misc_feature (61)..(62): /note="This region represents a CpG dinucleotide"
  misc_feature (61)..(61): /note="Nucleotide may be methylated to form 5-methylcytosine"
ccacaggtcaggtggagggtggggcatgggcatcggccaggattgctgtcaccttttctccggagctaccaagatcgttcctgtttctaagcagtcgcaccccagcagcctctctctctcca

SEQ ID NO: 19446 - DNA, 122 bp, Homo sapiens
  misc_feature (61)..(62): /note="This region represents a CpG dinucleotide"
  misc_feature (61)..(61): /note="Nucleotide may be methylated to form 5-methylcytosine"
agtgctccaggcatctcagtgggtagaggccagggatgctggtaaaaatcctcctttactcggaacagccactcacaggaaagaattataaggctcaaaatgtcaataggctgggcgtggtg

SEQ ID NO: 19447 - DNA, 122 bp, Homo sapiens
  misc_feature (61)..(62): /note="This region represents a CpG dinucleotide"
  misc_feature (61)..(61): /note="Nucleotide may be methylated to form 5-methylcytosine"
tgctgatccaaccacatcctccacccggaccaccaccacgcaaaagcagacttcctatctcgttggctccagcaaaccaaccacaggcttgagtgagccagaggccaggagaatctgctcct

SEQ ID NO: 19448 - DNA, 122 bp, Homo sapiens
  misc_feature (61)..(62): /note="This region represents a CpG dinucleotide"
  misc_feature (61)..(61): /note="Nucleotide may be methylated to form 5-methylcytosine"
gtacacatgaatagaaagcaccacaggtaataaaaacacctaaaaaggtcagcagaaactcggggagctgctggaaattcacctcctctgcctttctatgggactcagtgggcagtgatcag

SEQ ID NO: 19449 - DNA, 122 bp, Homo sapiens
  misc_feature (61)..(62): /note="This region represents a CpG dinucleotide"
  misc_feature (61)..(61): /note="Nucleotide may be methylated to form 5-methylcytosine"
tattccgagttctaggtcacctcaagccctccccgctgtccctagagctctcccactgttcgttaggaaccaaagcaaaatgtataaggctgctttcctcaccgccaagagactccgcagaa

SEQ ID NO: 19450 - DNA, 122 bp, Homo sapiens
  misc_feature (61)..(62): /note="This region represents a CpG dinucleotide"
  misc_feature (61)..(61): /note="Nucleotide may be methylated to form 5-methylcytosine"
actcacatcttgtattctgaatattactcttcacaaaaaataactagggctccttggagacgtgactaattatagaactgagtcagagaaagtataagatgagtctgaaatattttgtgcca

SEQ ID NO: 19451 - DNA, 122 bp, Homo sapiens
  misc_feature (61)..(62): /note="This region represents a CpG dinucleotide"
  misc_feature (61)..(61): /note="Nucleotide may be methylated to form 5-methylcytosine"
tctctttctgtcagccgccctccttacataacccaaatgggttgtttgcaaagctagtgtcgctgaggtgttctgtgtacaacagaaaagaatctagggaggattcctatgtgtcactaaag

SEQ ID NO: 19452 - DNA, 122 bp, Homo sapiens
  misc_feature (61)..(62): /note="This region represents a CpG dinucleotide"
  misc_feature (61)..(61): /note="Nucleotide may be methylated to form 5-methylcytosine"
tttttctattctttctccctcatttcaaaacaagacgttaatatcactccaagtttattgcgtaacgtaagggagtgggggaaaacataatgatttcaggaaaagaaaggatctgcaattgt

SEQ ID NO: 19453 - DNA, 122 bp, Homo sapiens
  misc_feature (61)..(62): /note="This region represents a CpG dinucleotide"
  misc_feature (61)..(61): /note="Nucleotide may be methylated to form 5-methylcytosine"
ccatgagaaaagtgtagtacccgggcgggtagcacagtccctcatggcttcccctggctgcgggagggaggtcccctggcttcttgcacttcctgggtaaagcaatgcctgcttctgcttct

SEQ ID NO: 19454 - DNA, 122 bp, Homo sapiens
  misc_feature (61)..(62): /note="This region represents a CpG dinucleotide"
  misc_feature (61)..(61): /note="Nucleotide may be methylated to form 5-methylcytosine"
acagtagcaccatgagactgttctcagcctcattttaaagatgagagttgaagcacagagcggtaaagaaacttgcccaagctaaggtcacacagctacgaagtgcaaaggctggatttcaa

SEQ ID NO: 19455 - DNA, 122 bp, Homo sapiens
  misc_feature (61)..(62): /note="This region represents a CpG dinucleotide"
  misc_feature (61)..(61): /note="Nucleotide may be methylated to form 5-methylcytosine"
aaatcaaaataacccaatccgagtctaaactcaagtcctttcttgcaaagctcagtagtgcgcgggggctgcggctctacgcctggctgtggtgcgaaacaagatgaaattttttcaaaaag

SEQ ID NO: 19456 - DNA, 122 bp, Homo sapiens
  misc_feature (61)..(62): /note="This region represents a CpG dinucleotide"
  misc_feature (61)..(61): /note="Nucleotide may be methylated to form 5-methylcytosine"
cgggaattcaacttgcaggtgcaaatcagcccagtaccaagcagttggtggcacacccaacgccagcctcccagggcttccatccagcaggtttcaaggcccaaggctgggtgtccccagga

SEQ ID NO: 19457 - DNA, 122 bp, Homo sapiens
  misc_feature (61)..(62): /note="This region represents a CpG dinucleotide"
  misc_feature (61)..(61): /note="Nucleotide may be methylated to form 5-methylcytosine"
tgctcacttaacctctgctctccagttacactcaggatagaatacatggaaagcacctggcgtattcagcagctcaacttatgttagtatttttcctccttcctcctccccggccacctaca

SEQ ID NO: 19458 - DNA, 122 bp, Homo sapiens
  misc_feature (61)..(62): /note="This region represents a CpG dinucleotide"
  misc_feature (61)..(61): /note="Nucleotide may be methylated to form 5-methylcytosine"
gtgatgagagatagattgggaattaatagcaaatcaggaaagaagcaattaagtaaatgacgagaattgaggctggttagagtaggtctgagaagcagagtagatacttttctcattttaat

SEQ ID NO: 19459 - DNA, 122 bp, Homo sapiens
  misc_feature (61)..(62): /note="This region represents a CpG dinucleotide"
  misc_feature (61)..(61): /note="Nucleotide may be methylated to form 5-methylcytosine"
tgagtgagcagagtttgctcatgcaggcacctaaattgctggcaagttcctgagctcattcgcttcaattcccgtactcatttgcatgggtgctccctcccacaaggggttgaacaggacag

SEQ ID NO: 19460 - DNA, 122 bp, Homo sapiens
  misc_feature (61)..(62): /note="This region represents a CpG dinucleotide"
  misc_feature (61)..(61): /note="Nucleotide may be methylated to form 5-methylcytosine"
ttccagatcttctttgctgggacctcattttccagtggtgcctaatggacgaagcctggccgcgttcccgccctggaatgaggctgacaagcctaggtcctcccagtggaaaatatgagtac

SEQ ID NO: 19461 - DNA, 122 bp, Homo sapiens
  misc_feature (61)..(62): /note="This region represents a CpG dinucleotide"
  misc_feature (61)..(61): /note="Nucleotide may be methylated to form 5-methylcytosine"
accggaaacagaatgtgctgactaagcaacctgagcaacctcatgatgactgttcacatacgtaatgagtttctgtaggtaatcatttttgaaagattttgctagactaattttaactctgg

SEQ ID NO: 19462 - DNA, 122 bp, Homo sapiens
  misc_feature (61)..(62): /note="This region represents a CpG dinucleotide"
  misc_feature (61)..(61): /note="Nucleotide may be methylated to form 5-methylcytosine"
atcctctagtggagagcaaatgaacaaaaggggaaagagagacgcgatgaattgcacgtgcgctattatatttgcaagcgggttacattgtccttggataagaattttatattccccgtgag

SEQ ID NO: 19463 - DNA, 122 bp, Homo sapiens
  misc_feature (61)..(62): /note="This region represents a CpG dinucleotide"
  misc_feature (61)..(61): /note="Nucleotide may be methylated to form 5-methylcytosine"
ccactcccagaaaaccagctccctggggacggctgtttcctcccagcaaggcagcaggggcgagaccgtgaaagaaccatcctgtgttctcagctgtgcacttccctcacgttcttactctg

SEQ ID NO: 19464 - DNA, 122 bp, Homo sapiens
  misc_feature (61)..(62): /note="This region represents a CpG dinucleotide"
  misc_feature (61)..(61): /note="Nucleotide may be methylated to form 5-methylcytosine"
atcaattattcatgaagaaaactccttactctagccaaattctctctaggatgcatgctacgagccaaatctcacaagccaagagacaagagagctgtcgtgattcatgagatgaatcaatt

SEQ ID NO: 19465 - DNA, 122 bp, Homo sapiens
  misc_feature (61)..(62): /note="This region represents a CpG dinucleotide"
  misc_feature (61)..(61): /note="Nucleotide may be methylated to form 5-methylcytosine"
ggacggtaatgagggcacctcagcttttcacatgcctgagtggatggtgagttcactggtcgttttgtttctccttctgtttcttgataatgagaggcaaccatttctgacgggtgacaagg

SEQ ID NO: 19466 - DNA, 122 bp, Homo sapiens
  misc_feature (61)..(62): /note="This region represents a CpG dinucleotide"
  misc_feature (61)..(61): /note="Nucleotide may be methylated to form 5-methylcytosine"
gggtcagatgggggctcccctcccgaggcccccttcccctgagcctctccctcctgaccccgaccctcgaacccaggcccagccccggcccacctcccgcgcctcccaagcggcgccacgta

SEQ ID NO: 19467 - DNA, 122 bp, Homo sapiens
  misc_feature (61)..(62): /note="This region represents a CpG dinucleotide"
  misc_feature (61)..(61): /note="Nucleotide may be methylated to form 5-methylcytosine"
ggagtgccagctaggcgcgaggcagacagtagtaacagcgggggcgtgtgtgtacacacacgcacaggcacgcacagggaccgacgcatgcatacacagacacacaagcagagaggcaggcc

SEQ ID NO: 19468 - DNA, 122 bp, Homo sapiens
  misc_feature (61)..(62): /note="This region represents a CpG dinucleotide"
  misc_feature (61)..(61): /note="Nucleotide may be methylated to form 5-methylcytosine"
gagaggctgggtgtggaatattctggctgtgctggctgtggacttagtcctgtgtcttcccgcatccagtgtagtctctggagaaagaatgcctgagctttaccagcaccacccaggaagcc

SEQ ID NO: 19469 - DNA, 122 bp, Homo sapiens
  misc_feature (61)..(62): /note="This region represents a CpG dinucleotide"
  misc_feature (61)..(61): /note="Nucleotide may be methylated to form 5-methylcytosine"
tttcgagggttgtgggttttcgtgctgaggccagcagttcctgcagagcagaggtgaggtcgggctccaggctagagtcatgtctggtccgcacttgatctctcacccataaatcctttcct

SEQ ID NO: 19470 - DNA, 122 bp, Homo sapiens
  misc_feature (61)..(62): /note="This region represents a CpG dinucleotide"
  misc_feature (61)..(61): /note="Nucleotide may be methylated to form 5-methylcytosine"
tctccttcctggtggcttaagtagttgttcacagactttacatattcccatgtgacctgacgaagcaatataggaagtgctgagagcatggtagattagctaagtcctgaggttggaacaat

SEQ ID NO: 19471 - DNA, 122 bp, Homo sapiens
  misc_feature (61)..(62): /note="This region represents a CpG dinucleotide"
  misc_feature (61)..(61): /note="Nucleotide may be methylated to form 5-methylcytosine"
taaatgaggaatgctatgaaatgccaatataaacatttatccaaccctcagctatgcaaacgtaggtgaatttacttgctaagttagaaattttgataacctaaatgttgcaggaaagcatc

SEQ ID NO: 19472 - DNA, 122 bp, Homo sapiens
  misc_feature (61)..(62): /note="This region represents a CpG dinucleotide"
  misc_feature (61)..(61): /note="Nucleotide may be methylated to form 5-methylcytosine"
aaaactatcatattaccaagtggacatggctcctaaggtgccaactgaacacaggtaagtcgggtaaggaaaggcacacagtctcattacttagactaccccgcagccgcttattgaattag

SEQ ID NO: 19473 - DNA, 122 bp, Homo sapiens
  misc_feature (61)..(62): /note="This region represents a CpG dinucleotide"
  misc_feature (61)..(61): /note="Nucleotide may be methylated to form 5-methylcytosine"
gtcatggaaatgccttacagtaggattcatttggagcaggggttcccaaccccaaggccacggacaggtactgctcgggaactgctctgtggcctgatagcaacctggctgcacagcaggag

SEQ ID NO: 19474 - DNA, 122 bp, Homo sapiens
  misc_feature (61)..(62): /note="This region represents a CpG dinucleotide"
  misc_feature (61)..(61): /note="Nucleotide may be methylated to form 5-methylcytosine"
gtacaactgaaagtacctcttctacccccagtttctgtgaaagcaggactcgcccaagtgcgactggctagcttgacttgaagtgctcctttgcacaaagaaataaagctccttctcgctaa

SEQ ID NO: 19475 - DNA, 122 bp, Homo sapiens
  misc_feature (61)..(62): /note="This region represents a CpG dinucleotide"
  misc_feature (61)..(61): /note="Nucleotide may be methylated to form 5-methylcytosine"
ctcacaccaaatcagcttgccccattattatccaggcacttgatttcttcatcctctcgacgtcattagacttcgcctttgccgggaatactgaggcaccctttcttcctcctttatctggc

SEQ ID NO: 19476 - DNA, 122 bp, Homo sapiens
  misc_feature (61)..(62): /note="This region represents a CpG dinucleotide"
  misc_feature (61)..(61): /note="Nucleotide may be methylated to form 5-methylcytosine"
caagagggatgtgaagatgtggactcagtggctgagtcactggggagctgccctcccagccgagaaggcagagggggcccctgagagcaggagacggagctgctttaggcctctgccccaca

SEQ ID NO: 19477 - DNA, 122 bp, Homo sapiens
  misc_feature (61)..(62): /note="This region represents a CpG dinucleotide"
  misc_feature (61)..(61): /note="Nucleotide may be methylated to form 5-methylcytosine"
agaaacattttacagcctcttctctctgaagcctgctaccctatccgaatacttcatctgcgtgataaaacacattggtctccacaacctcttaacccagacattcctttctttaatcccag

SEQ ID NO: 19478 - DNA, 122 bp, Homo sapiens
  misc_feature (61)..(62): /note="This region represents a CpG dinucleotide"
  misc_feature (61)..(61): /note="Nucleotide may be methylated to form 5-methylcytosine"
gccacctctcttctcacctatctcagtatttttaaatattgatgaaaaccacaaattgaacgcctccttattcagtttctcacaggctgttaccaacaatggggcaaggttacacactagta

SEQ ID NO: 19479 - DNA, 122 bp, Homo sapiens
  misc_feature (61)..(62): /note="This region represents a CpG dinucleotide"
  misc_feature (61)..(61): /note="Nucleotide may be methylated to form 5-methylcytosine"
ttggtgaacaaacactaaaaatgaaaacagatgatctacaatcccagacttagagaataacgttgttactactttggaatataaccaaaactggggcctcttccaacatgtcaaaatatttt

SEQ ID NO: 19480 - DNA, 122 bp, Homo sapiens
  misc_feature (61)..(62): /note="This region represents a CpG dinucleotide"
  misc_feature (61)..(61): /note="Nucleotide may be methylated to form 5-methylcytosine"
attctctatcctgttactctgctttattttcttctatggcatttattcccatctgtcaggcgtaatgttttacttattcatttgtttctgtctgcctcccctctagaatgtgaactccctga

SEQ ID NO: 19481 - DNA, 122 bp, Homo sapiens
  misc_feature (61)..(62): /note="This region represents a CpG dinucleotide"
  misc_feature (61)..(61): /note="Nucleotide may be methylated to form 5-methylcytosine"
gttcattggctgtaatctagaaccttctggttagctaccaccactcagatgtcgatgaagcgagctatgttgtgtaaataactcagttatcttctctatcgttactagtccttttcctctta

SEQ ID NO: 19482 - DNA, 122 bp, Homo sapiens
  misc_feature (61)..(62): /note="This region represents a CpG dinucleotide"
  misc_feature (61)..(61): /note="Nucleotide may be methylated to form 5-methylcytosine"
taatcaaggcccatgatagatatacgaagtcttcagggtatttggctctatcagcgttcacgctgcctgaaagggtgatcagtcttcagggatctgttatttagtgccaagtcttccttatt

SEQ ID NO: 19483 - DNA, 122 bp, Homo sapiens
  misc_feature (61)..(62): /note="This region represents a CpG dinucleotide"
  misc_feature (61)..(61): /note="Nucleotide may be methylated to form 5-methylcytosine"
gcatcagaatcactagaagtgcttgggcaacattcctattgaatgttgaagcagaatctgcggtggttaggcccaggaatctgtgctcttaatcaacacttcagatgattcttaagcacaaa

SEQ ID NO: 19484 - DNA, 122 bp, Homo sapiens
  misc_feature (61)..(62): /note="This region represents a CpG dinucleotide"
  misc_feature (61)..(61): /note="Nucleotide may be methylated to form 5-methylcytosine"
ggctgggatgcactgcagatagctattgcaaacccctctactatttccgattagtggatacgtgtgtgagttgtatgcctgtcttatatttacaagaggaagtatcccgtttaattttactt

SEQ ID NO: 19485 - DNA, 122 bp, Homo sapiens
  misc_feature (61)..(62): /note="This region represents a CpG dinucleotide"
  misc_feature (61)..(61): /note="Nucleotide may be methylated to form 5-methylcytosine"
caaactctaggactctgaggtgtccttgcagggattaaaactctgactaggtgtcttagtcggcttgggctgccatcacaaaataccatagtcagaatggcttcaacaacagacatttattt

SEQ ID NO: 19486 - DNA, 122 bp, Homo sapiens
  misc_feature (61)..(62): /note="This region represents a CpG dinucleotide"
  misc_feature (61)..(61): /note="Nucleotide may be methylated to form 5-methylcytosine"
ggaagtgttgggactaggactaggttattagcagtaggagtaaaaagggatagatactgacgactttagaaagaaccaacattggtgactgactgggtgttttcccagactacacttccagg

SEQ ID NO: 19487 - DNA, 122 bp, Homo sapiens
  misc_feature (61)..(62): /note="This region represents a CpG dinucleotide"
  misc_feature (61)..(61): /note="Nucleotide may be methylated to form 5-methylcytosine"
tagctgggattacaggtgtgcaccaccacgcccagacattgttgtatttcttgtagagaccgggttttgccatgttggccaggctgttctcgaattcctgacctcaagtgatccgccgacct

SEQ ID NO: 19488 - DNA, 122 bp, Homo sapiens
  misc_feature (61)..(62): /note="This region represents a CpG dinucleotide"
  misc_feature (61)..(61): /note="Nucleotide may be methylated to form 5-methylcytosine"
tggggtgggtggtccattcttggggacaaggcaggtcatcctgctgaatgtgtgtctctgcgatgtgccctttgggaaaaggaggaacaaggacagcaggatggctgcaggcacctgaccaa

SEQ ID NO: 19489 - DNA, 122 bp, Homo sapiens
  misc_feature (61)..(62): /note="This region represents a CpG dinucleotide"
  misc_feature (61)..(61): /note="Nucleotide may be methylated to form 5-methylcytosine"
tttaagggagactgggacatcggaagaaaaaaggggtgatgcagagctcaaatctgtacacgcttgtttgaggtgatagcagacatccagatgaagaaaaccagcagacaggtgaaaatctt

SEQ ID NO: 19490 - DNA, 122 bp, Homo sapiens
  misc_feature (61)..(62): /note="This region represents a CpG dinucleotide"
  misc_feature (61)..(61): /note="Nucleotide may be methylated to form 5-methylcytosine"
gttcgtgttcttgacctactgagccagtctacgtattaacaagatctcacacgtgactcacgtgtgcattaaaatctgagacttactggactagctcaggaacatggcctctcagagccctt

SEQ ID NO: 19491 - DNA, 122 bp, Homo sapiens
  misc_feature (61)..(62): /note="This region represents a CpG dinucleotide"
  misc_feature (61)..(61): /note="Nucleotide may be methylated to form 5-methylcytosine"
gactgttctttctgaactgtccctagtggtgctttgtcatactgctcacctagcagctatcgtactttgttctctgaccagttattcctgtcttttaaaaaggcagtatgtgtaaagcatcg

SEQ ID NO: 19492 - DNA, 122 bp, Homo sapiens
  misc_feature (61)..(62): /note="This region represents a CpG dinucleotide"
  misc_feature (61)..(61): /note="Nucleotide may be methylated to form 5-methylcytosine"
tgcttgtgtcctgagcaaactttctaacctatgtgggcaccaaattcctcatctgtaatacgggactgataatagccgttttggaaagttgacatggtgattaaaataatttgcttagctaa

SEQ ID NO: 19493 - DNA, 122 bp, Homo sapiens
  misc_feature (61)..(62): /note="This region represents a CpG dinucleotide"
  misc_feature (61)..(61): /note="Nucleotide may be methylated to form 5-methylcytosine"
actgcaaacctctggctgcaggggtcggctcagttgctagcgataccgttgctaactactcgcctgaaagtgacacctgtgatctaaccctggctgctagatcccagaaggaagccggcagc

SEQ ID NO: 19494 - DNA, 122 bp, Homo sapiens
  misc_feature (61)..(62): /note="This region represents a CpG dinucleotide"
  misc_feature (61)..(61): /note="Nucleotide may be methylated to form 5-methylcytosine"
aagttctagagaagggggttcagggttccggctctctggctctcacagctgaggccaaaacgtcaggcgccacaccagtatctcggcttgccatttcgtcaccagctgaatgccagtcgcaa

SEQ ID NO: 19495 - DNA, 122 bp, Homo sapiens
  misc_feature (61)..(62): /note="This region represents a CpG dinucleotide"
  misc_feature (61)..(61): /note="Nucleotide may be methylated to form 5-methylcytosine"
gaagaccctagggctcagatggacatttgtcaggctgcctgttgcttactctgtacttgccgcagggtaggaaacaaagtggttgcttgttcctggaaattctttatactaggtatcatctt

SEQ ID NO: 19496 - DNA, 122 bp, Homo sapiens
  misc_feature (61)..(62): /note="This region represents a CpG dinucleotide"
  misc_feature (61)..(61): /note="Nucleotide may be methylated to form 5-methylcytosine"
atgtgttcaatcaaacgatttgttcagaactatatgaccacgcttagtttcacttcccaccgcaggtctctgataacctctgaaaactctgtttttgtggttatactgtcattcattattca

SEQ ID NO: 19497 - DNA, 122 bp, Homo sapiens
  misc_feature (61)..(62): /note="This region represents a CpG dinucleotide"
  misc_feature (61)..(61): /note="Nucleotide may be methylated to form 5-methylcytosine"
gatctgtgactccccggtgcccctgccagaattgatctcgaaatggtggattacaacagccgtggtacatccacaagctgcctgggagtttcttgtcttctcatcacagtcaaaatggctta

SEQ ID NO: 19498 - DNA, 122 bp, Homo sapiens
  misc_feature (61)..(62): /note="This region represents a CpG dinucleotide"
  misc_feature (61)..(61): /note="Nucleotide may be methylated to form 5-methylcytosine"
cagagcccccaggctgtgcacacgtgggctccaggcgaaccatttcaggttcagggaagacggctcagcctaacctgggtggggctgacttctgtgcacaacatctacacctggccctctgt

SEQ ID NO: 19499 - DNA, 122 bp, Homo sapiens
  misc_feature (61)..(62): /note="This region represents a CpG dinucleotide"
  misc_feature (61)..(61): /note="Nucleotide may be methylated to form 5-methylcytosine"
ttgttttgagaattaaaccacacagtcttggcaaagtaccttgcaggatgtgcccttcttcgtcaacaggtttagaggcaggaggtttgaaagagtgaacactaatctaaaaataggacacc

SEQ ID NO: 19500 - DNA, 122 bp, Homo sapiens
  misc_feature (61)..(62): /note="This region represents a CpG dinucleotide"
  misc_feature (61)..(61): /note="Nucleotide may be methylated to form 5-methylcytosine"
agttagggaggactgtagacctggaacatgattctcagaaatgcatgtgaaaaacacattcgaatttgggagatttttttggagatagtgtggaacagtggaaaaagcagatcagctctgtg

SEQ ID NO: 19501 - DNA, 122 bp, Homo sapiens
  misc_feature (61)..(62): /note="This region represents a CpG dinucleotide"
  misc_feature (61)..(61): /note="Nucleotide may be methylated to form 5-methylcytosine"
agcagaggagcagtggagagatcactcctgagtgtgcgtgctgtgcttagcatagcagtgcggctcataaccgtatgggggtgtttaacaatgccacttggtgatttttatgatgtcatgcc

SEQ ID NO: 19502 - DNA, 122 bp, Homo sapiens
  misc_feature (61)..(62): /note="This region represents a CpG dinucleotide"
  misc_feature (61)..(61): /note="Nucleotide may be methylated to form 5-methylcytosine"
agagatccaccagtgcagttttgcttaatcctcatgataaccctatgtggagagttctcacgttgtcaacaggatagagatgagaagacagaggcttagagaagttaaataacttacccagc

SEQ ID NO: 19503 - DNA, 122 bp, Homo sapiens
  misc_feature (61)..(62): /note="This region represents a CpG dinucleotide"
  misc_feature (61)..(61): /note="Nucleotide may be methylated to form 5-methylcytosine"
gcctaagcatacaaagattatcaaagaaaaaatcaaggaataaacaaaactcacataagccgattctagaggtgtggcctgggctgctctaaagggatttgtggaattactgaggttacctg

SEQ ID NO: 19504 - DNA, 122 bp, Homo sapiens
  misc_feature (61)..(62): /note="This region represents a CpG dinucleotide"
  misc_feature (61)..(61): /note="Nucleotide may be methylated to form 5-methylcytosine"
aaaaacaattgaaatccatcccttacgcacagatcagcatctgtcctggtttttgggtcacgtgctctctggccactcctcccgagcatgctccctcctggaacccagccacctgctgagag

SEQ ID NO: 19505 - DNA, 122 bp, Homo sapiens
  misc_feature (61)..(62): /note="This region represents a CpG dinucleotide"
  misc_feature (61)..(61): /note="Nucleotide may be methylated to form 5-methylcytosine"
tttatcttgaagtgtatgaatatttcggggataaacaaagcaactattctttgaaatatgcgtctgtggccaagtgattccagttacttggaatcacagttctgttgattctcttttctgct

SEQ ID NO: 19506 - DNA, 122 bp, Homo sapiens
  misc_feature (61)..(62): /note="This region represents a CpG dinucleotide"
  misc_feature (61)..(61): /note="Nucleotide may be methylated to form 5-methylcytosine"
tggcagcctgttcatgaggcaaactttccgagtttcagcctcttcgtttttgaaattgtacgtgtttttgccacagtattgacatgattgcatgaagaggtattacgtgtatgtgaaaatat

SEQ ID NO: 19507 - DNA, 122 bp, Homo sapiens
  misc_feature (61)..(62): /note="This region represents a CpG dinucleotide"
  misc_feature (61)..(61): /note="Nucleotide may be methylated to form 5-methylcytosine"
ggaaaagtggtttttctgattaaacatcaggaactagagtcaacaatcgctgtcctctcccgtgcctgtcacgctccactccccacccagctgcaatgtggccttgattttctcatcagtaa

SEQ ID NO: 19508 - DNA, 122 bp, Homo sapiens
  misc_feature (61)..(62): /note="This region represents a CpG dinucleotide"
  misc_feature (61)..(61): /note="Nucleotide may be methylated to form 5-methylcytosine"
atttctgcccaatttttaaatccttgccattcatttccaaatgccctggttttcggttcacgtttagattgggaatggactcctgccaagaaggaaatgagagcttagggtgttgggaggag

SEQ ID NO: 19509 - DNA, 122 bp, Homo sapiens
  misc_feature (61)..(62): /note="This region represents a CpG dinucleotide"
  misc_feature (61)..(61): /note="Nucleotide may be methylated to form 5-methylcytosine"
atgtaacagatgagtgtcacctggtttcctagtttcagccctgaacacgtctccgagtcacgctggaggcgtaaacaatggatagggcaggcaggtgaaacccatcttcccgccgagcttta

SEQ ID NO: 19510 - DNA, 122 bp, Homo sapiens
  misc_feature (61)..(62): /note="This region represents a CpG dinucleotide"
  misc_feature (61)..(61): /note="Nucleotide may be methylated to form 5-methylcytosine"
tgaaatggtatgacaactcttgtggaaaattaggattcttaatggatttcttagctgagacgcctcaactttgccctgaaacagcgtcagcaccctggttttagatccaaatgttacttcca

SEQ ID NO: 19511 - DNA, 122 bp, Homo sapiens
  misc_feature (61)..(62): /note="This region represents a CpG dinucleotide"
  misc_feature (61)..(61): /note="Nucleotide may be methylated to form 5-methylcytosine"
tgtagctcagagcttctcaacacagggctgatttgggccctgatttggccatgtctggggcgtttttggctgtcatgactgggccatcatctggtgatgctgctgacatcctgtgggtggag

SEQ ID NO: 19512 - DNA, 122 bp, Homo sapiens
  misc_feature (61)..(62): /note="This region represents a CpG dinucleotide"
  misc_feature (61)..(61): /note="Nucleotide may be methylated to form 5-methylcytosine"
tgatgaaggtggacgattgaattctatggcatgtaaatgctttgcgtaatcacagggcaacggggaggatgttcctgagaaatgagattgtttataattatggttacttttgacacaccctc

SEQ ID NO: 19513 - DNA, 122 bp, Homo sapiens
  misc_feature (61)..(62): /note="This region represents a CpG dinucleotide"
  misc_feature (61)..(61): /note="Nucleotide may be methylated to form 5-methylcytosine"
ttcaagttagatgaaagcacagatgttatttgtgggtaaaaactctgaattgtttcataacggtagctagtttcctgaaagctttttgaaaaatgttgggatacagtatctccaaaaaccct

SEQ ID NO: 19514 - DNA, 122 bp, Homo sapiens
  misc_feature (61)..(62): /note="This region represents a CpG dinucleotide"
  misc_feature (61)..(61): /note="Nucleotide may be methylated to form 5-methylcytosine"
tcctccaggcctcagaaggaaccagccccgctgactccctgacctcaggtttcctgccggcggcctccagtgctgcgagacaacagacatctgtcgtttaagctactagggctgtaatattt

SEQ ID NO: 19515 - DNA, 122 bp, Homo sapiens
  misc_feature (61)..(62): /note="This region represents a CpG dinucleotide"
  misc_feature (61)..(61): /note="Nucleotide may be methylated to form 5-methylcytosine"
tcatatgaagtaggtccaatctgtggttgttgctgtaatcagtgtgtcagcacagagttccgcaatttcagtatctttctaaataaccgactgtggaatgtttgtaatcacacagcacatag

SEQ ID NO: 19516 - DNA, 122 bp, Homo sapiens
  misc_feature (61)..(62): /note="This region represents a CpG dinucleotide"
  misc_feature (61)..(61): /note="Nucleotide may be methylated to form 5-methylcytosine"
ttccacaaatgcttacttactgagcactcattaccatcaaggcacagcatcatcctgctccggctaagtccccacgtacgccattaaacaacggtcaaatggtaacatgttcgtgtgtgtag

SEQ ID NO: 19517 - DNA, 122 bp, Homo sapiens
  misc_feature (61)..(62): /note="This region represents a CpG dinucleotide"
  misc_feature (61)..(61): /note="Nucleotide may be methylated to form 5-methylcytosine"
gtgccttgtggtgtatacacaggcaatgagctctaaaaagcactttaatcgaacgaacaacggctgctttcagcagtaggatgagtcacaaacttaatgttgaaatcaagcagccagacaca

SEQ ID NO: 19518 - DNA, 122 bp, Homo sapiens
  misc_feature (61)..(62): /note="This region represents a CpG dinucleotide"
  misc_feature (61)..(61): /note="Nucleotide may be methylated to form 5-methylcytosine"
ctctgtcataaagactgcccacaggggagcctgtgagttggaatggctgggaatcaggagcgttgtagtgattgtgctcagtccttacctaggagttatgtcaggaaaagcctggccttagc

SEQ ID NO: 19519 - DNA, 122 bp, Homo sapiens
  misc_feature (61)..(62): /note="This region represents a CpG dinucleotide"
  misc_feature (61)..(61): /note="Nucleotide may be methylated to form 5-methylcytosine"
gcacttaacactacctggcacagattaagctcatctgaagtgggagctgttacttaggggcgtttgcctagaacacagggtccagaggctctctcccggaaacttagacccagtgagtcaga

SEQ ID NO: 19520 - DNA, 122 bp, Homo sapiens
  misc_feature (61)..(62): /note="This region represents a CpG dinucleotide"
  misc_feature (61)..(61): /note="Nucleotide may be methylated to form 5-methylcytosine"
tggggcctcaggttttacagacccttttgggccaggttttactaaaagagccataagaagcgggcccagcccaggcaggagactggagacgaggtcttgcaggcggaactcaggatgctctg

SEQ ID NO: 19521 - DNA, 122 bp, Homo sapiens
  misc_feature (61)..(62): /note="This region represents a CpG dinucleotide"
  misc_feature (61)..(61): /note="Nucleotide may be methylated to form 5-methylcytosine"
ggccagctttgcagcctcagcaaattctctgacattcaatgagcctgagtcactgaacttcgtcaatgagagtttctcatccctaagggcagtggctgctccctatatctgctattcctatg

SEQ ID NO: 19522 - DNA, 122 bp, Homo sapiens
  misc_feature (61)..(62): /note="This region represents a CpG dinucleotide"
  misc_feature (61)..(61): /note="Nucleotide may be methylated to form 5-methylcytosine"
cgtgacaggatgagtgacagcatcggatacacagaggtggagggatcctgggagtggtgacgacctgacaatatctgagcttatatgcaccagattgagggagagctggggggagtgcagtg

SEQ ID NO: 19523 - DNA, 122 bp, Homo sapiens
  misc_feature (61)..(62): /note="This region represents a CpG dinucleotide"
  misc_feature (61)..(61): /note="Nucleotide may be methylated to form 5-methylcytosine"
gctgtggcaatccagtttatgcagaacatactgatcccaggcttggtgtaagcgcatgctcgtcaatattttaaacccgtaaccggactttcttccgtggtatttttagaaataccagtaga

SEQ ID NO: 19524 - DNA, 122 bp, Homo sapiens
  misc_feature (61)..(62): /note="This region represents a CpG dinucleotide"
  misc_feature (61)..(61): /note="Nucleotide may be methylated to form 5-methylcytosine"
tgcttggcttggtagggtgatgatttaccaccagccatctactttgtttttccaactctccgttgctctcaccagaacacgatgtcctacaagcatcaagatgtgtttgtgttttttttttc

SEQ ID NO: 19525 - DNA, 122 bp, Homo sapiens
  misc_feature (61)..(62): /note="This region represents a CpG dinucleotide"
  misc_feature (61)..(61): /note="Nucleotide may be methylated to form 5-methylcytosine"
gaagtattcagggaggaagagggcttgaggtcccataacagcaattatgaggtggtaatccggagatgaatgtgttacccacaaaagaataatgcattcatgcataaccaagagctgagagc

SEQ ID NO: 19526 - DNA, 122 bp, Homo sapiens
  misc_feature (61)..(62): /note="This region represents a CpG dinucleotide"
  misc_feature (61)..(61): /note="Nucleotide may be methylated to form 5-methylcytosine"
cgagtgtttctctccatcatcttggctgtgtcctcggaacctagacccagatgtggcatacgctaggtgctcagcacttgctcagagcagtcacaactctgcaggtgataagggtggtggca

SEQ ID NO: 19527 - DNA, 122 bp, Homo sapiens
  misc_feature (61)..(62): /note="This region represents a CpG dinucleotide"
  misc_feature (61)..(61): /note="Nucleotide may be methylated to form 5-methylcytosine"
tattattatatgggtctggaattagttcctgaatccttctgagatgtgatgacttataaacgtaggttgagtttactcatgatagggtcatcgcaactatgcatagctaaaatcaaattttg

SEQ ID NO: 19528 - DNA, 122 bp, Homo sapiens
  misc_feature (61)..(62): /note="This region represents a CpG dinucleotide"
  misc_feature (61)..(61): /note="Nucleotide may be methylated to form 5-methylcytosine"
tattacaataagccctttcttaggtgcagagagaaagccttgctctcacattcagaggctcgtgtttgcatccagccaaagaatgagattgacctcaaggtctgatgatccaggtgggctcc

SEQ ID NO: 19529 - DNA, 122 bp, Homo sapiens
  misc_feature (61)..(62): /note="This region represents a CpG dinucleotide"
  misc_feature (61)..(61): /note="Nucleotide may be methylated to form 5-methylcytosine"
catggaacccacatccacaaccatctgtatgagccacaggtccacagtcctgaccaattccgtttgacactaatgttactctacatgagtagagttcaatgagggttgatatgggatgtgac

SEQ ID NO: 19530 - DNA, 122 bp, Homo sapiens
  misc_feature (61)..(62): /note="This region represents a CpG dinucleotide"
  misc_feature (61)..(61): /note="Nucleotide may be methylated to form 5-methylcytosine"
ctgtgagttatgctgtcattgtgtctaataaatcctcctccaaagggcccagcctggcctcggtaatacaggtgtttctgtttctgtccactcacctctgagtcaaagcattaaatgcagag

SEQ ID NO: 19531 - DNA, 122 bp, Homo sapiens
  misc_feature (61)..(62): /note="This region represents a CpG dinucleotide"
  misc_feature (61)..(61): /note="Nucleotide may be methylated to form 5-methylcytosine"
gaaatgaagtaacttaatcaggatcataagtgacaagagccagcattcaatccagtcggacgctgcccaagcccttcctcctaatcacaacaactaccttctagaggcaggagacatttcta

SEQ ID NO: 19532 - DNA, 122 bp, Homo sapiens
  misc_feature (61)..(62): /note="This region represents a CpG dinucleotide"
  misc_feature (61)..(61): /note="Nucleotide may be methylated to form 5-methylcytosine"
ccctgctattttacccgggctgactttgggctgaattgagtctgtttgtccactatgaaacgttggcaaccaccaagagtggagaaaaatacaagcacatttgaatgtttcgtatcttttta

SEQ ID NO: 19533 - DNA, 122 bp, Homo sapiens
  misc_feature (61)..(62): /note="This region represents a CpG dinucleotide"
  misc_feature (61)..(61): /note="Nucleotide may be methylated to form 5-methylcytosine"
tacccagggaacctaaagtgctgcttggtgtaggtgggagatgattaatctctccgtgcacgataaaaagacagagctgccacccggaattagtctgtttatgtagaatgaggacagcccca

SEQ ID NO: 19534 - DNA, 122 bp, Homo sapiens
  misc_feature (61)..(62): /note="This region represents a CpG dinucleotide"
  misc_feature (61)..(61): /note="Nucleotide may be methylated to form 5-methylcytosine"
aagcagagaaacactcagggagatggaacagctacaagaagctgtgaccaagcttctccccgctgatttgaggcactgtttgccttcctctactcttagtttacagactctactgatcccag

SEQ ID NO: 19535 - DNA, 122 bp, Homo sapiens
  misc_feature (61)..(62): /note="This region represents a CpG dinucleotide"
  misc_feature (61)..(61): /note="Nucleotide may be methylated to form 5-methylcytosine"
cttcctccactgaacaataaccatgtcgaccggcaatatcagaaaggtcatccggtgaagcgttcactctgcagttgtgcaccactgggttttgagagtgctggctaaatattttaagtgat

SEQ ID NO: 19536 - DNA, 122 bp, Homo sapiens
  misc_feature (61)..(62): /note="This region represents a CpG dinucleotide"
  misc_feature (61)..(61): /note="Nucleotide may be methylated to form 5-methylcytosine"
gtctttgccacactctcatacaatctattctccatagtcatcagagtttctttaaaggcacggttcagacaatggcaccctctgttccaaaccctccagggcttcctatttcacttagcata

SEQ ID NO: 19537 - DNA, 122 bp, Homo sapiens
  misc_feature (61)..(62): /note="This region represents a CpG dinucleotide"
  misc_feature (61)..(61): /note="Nucleotide may be methylated to form 5-methylcytosine"
attatgggctgtgagtaaggcacttgcacagcatgggccacttaatctgctgggccaaggcgaggcctatgtgacaggaattccgtgaaaggcctgaatgataatccaacctccccctcctc

SEQ ID NO: 19538 - DNA, 122 bp, Homo sapiens
  misc_feature (61)..(62): /note="This region represents a CpG dinucleotide"
  misc_feature (61)..(61): /note="Nucleotide may be methylated to form 5-methylcytosine"
actctcaggtctgggctttggcctccagaaaatccagtctcgattcttcacattggtattcgcagctttgcatcacctggttctcacccgctttgattaccttaatcacagatgacatccca

SEQ ID NO: 19539 - DNA, 122 bp, Homo sapiens
  misc_feature (61)..(62): /note="This region represents a CpG dinucleotide"
  misc_feature (61)..(61): /note="Nucleotide may be methylated to form 5-methylcytosine"
cagaaattgctgggtgatgcattctaaaccattttcagtctggactgtttcccaggtacacgaatgttttctctgcttacttaaactcagttatatttaacttgtcttggatttttattttt

SEQ ID NO: 19540 - DNA, 122 bp, Homo sapiens
  misc_feature (61)..(62): /note="This region represents a CpG dinucleotide"
  misc_feature (61)..(61): /note="Nucleotide may be methylated to form 5-methylcytosine"
tcctcaaatacatcctcaaagaaacttgattgtttattgtggtgtcacatttatgacccacgtaagtagcagtcaactaatatctttataaaactctgatttataggtactttgattgggct

SEQ ID NO: 19541 - DNA, 122 bp, Homo sapiens
  misc_feature (61)..(62): /note="This region represents a CpG dinucleotide"
  misc_feature (61)..(61): /note="Nucleotide may be methylated to form 5-methylcytosine"
aagtcctgtatatgtatgtagtagtttgggtgtgtatatatagtagcatttcaaaatggacgtactggtttaacctcctatccttggagagcagctggctctccaccttgttacacattatg

SEQ ID NO: 19542 - DNA, 122 bp, Homo sapiens
  misc_feature (61)..(62): /note="This region represents a CpG dinucleotide"
  misc_feature (61)..(61): /note="Nucleotide may be methylated to form 5-methylcytosine"
accagcccctggcttcctcttgggccccccaaccatggtgtggtacctcccttcctcttgcggtctgtgagtatagcaagctacctttcaacaacaatcatctcctgatctgctgaccgcgt

SEQ ID NO: 19543 - DNA, 122 bp, Homo sapiens
  misc_feature (61)..(62): /note="This region represents a CpG dinucleotide"
  misc_feature (61)..(61): /note="Nucleotide may be methylated to form 5-methylcytosine"
ctcctgcccaccagtctcccgggagggcagccctccagtcaaccctaacggaaaccagagcgaaagcgagactagagatgctttatgcatcagcctcatggagcataaagtgagggttacgg

SEQ ID NO: 19544 - DNA, 122 bp, Homo sapiens
  misc_feature (61)..(62): /note="This region represents a CpG dinucleotide"
  misc_feature (61)..(61): /note="Nucleotide may be methylated to form 5-methylcytosine"
tataacaacatgggtgatcaactgggctagaaggagttttcagaggcttctaattaattgcgcaattgtcctcaggctgggcatcaggccaatcacatacaggagataattggagggcagct

SEQ ID NO: 19545 - DNA, 122 bp, Homo sapiens
  misc_feature (61)..(62): /note="This region represents a CpG dinucleotide"
  misc_feature (61)..(61): /note="Nucleotide may be methylated to form 5-methylcytosine"
catgggcttcattcttcccagtgtggtctatcctatgaggctgcttgggcttccttgcagcgtggtggctggttccatgagggaggaagtgagatctgccagtcgttttaaatgctgtagtg

SEQ ID NO: 19546 - DNA, 122 bp, Homo sapiens
  misc_feature (61)..(62): /note="This region represents a CpG dinucleotide"
  misc_feature (61)..(61): /note="Nucleotide may be methylated to form 5-methylcytosine"
aaagatccagttatgactggaactgtcctggcctgagtattgtcctggacccagagggagcgaaggagggagggagggagggagggagaaagagagagagagaggggagaaatatgagagga

SEQ ID NO: 19547 - DNA, 122 bp, Homo sapiens
  misc_feature (61)..(62): /note="This region represents a CpG dinucleotide"
  misc_feature (61)..(61): /note="Nucleotide may be methylated to form 5-methylcytosine"
gcccagctttgtgttgatctactttgtccttccaggtccactcgctacacttcctccctgcgttgggccaggaagctgacttttatgaactatatcagtgggctccctcgcccccggcttcc

SEQ ID NO: 19548 - DNA, 122 bp, Homo sapiens
  misc_feature (61)..(62): /note="This region represents a CpG dinucleotide"
  misc_feature (61)..(61): /note="Nucleotide may be methylated to form 5-methylcytosine"
catccttaagtacatgtacaagtatcactctgaaaagagcaccttaattctcttttcttccgaatggcctttaacagttctttttcttcaaacattccaggaaacaccagaaccatctggca

SEQ ID NO: 19549 - DNA, 122 bp, Homo sapiens
  misc_feature (61)..(62): /note="This region represents a CpG dinucleotide"
  misc_feature (61)..(61): /note="Nucleotide may be methylated to form 5-methylcytosine"
agaatagaatccagtgactaaaggtcctaagacattaggagtcaggagtcctgccctgtgcgataagacctgagaagttatggacaggacactaaatgggtctgccacatcccttctgggtc

SEQ ID NO: 19550 - DNA, 122 bp, Homo sapiens
  misc_feature (61)..(62): /note="This region represents a CpG dinucleotide"
  misc_feature (61)..(61): /note="Nucleotide may be methylated to form 5-methylcytosine"
ggttggggcttgggattgtatcagcgttgagctttcattacaaaaaagacaagtcctcagcgcagtgcaggagatagacatcaaaacaaataatgaaaatgctggtgatggaaatgacacga

SEQ ID NO: 19551 - DNA, 122 bp, Homo sapiens
  misc_feature (61)..(62): /note="This region represents a CpG dinucleotide"
  misc_feature (61)..(61): /note="Nucleotide may be methylated to form 5-methylcytosine"
gcatatgggtagagcagtgtcacctcttaacttttcttgcctgtttcatttagctgtgggcgaggaaaattagctgtttgcttttcattactggaagatttatcaagttaaggtgcatcaat

SEQ ID NO: 19552 - DNA, 122 bp, Homo sapiens
  misc_feature (61)..(62): /note="This region represents a CpG dinucleotide"
  misc_feature (61)..(61): /note="Nucleotide may be methylated to form 5-methylcytosine"
atattttgttgatttagacttaatttacaagtaaggctgacagcccacagagtgtgatcacgacagcattgttatggaaataaatgccagctcatgcatttgggatgtacaccatggatctg

SEQ ID NO: 19553 - DNA, 122 bp, Homo sapiens
  misc_feature (61)..(62): /note="This region represents a CpG dinucleotide"
  misc_feature (61)..(61): /note="Nucleotide may be methylated to form 5-methylcytosine"
cgtcccaactccgccggtatacgagtcgctgtgttatataatgcagacagtttaataaaacgaagctcctgttattttgattctgggaatctgcagtggcccttgagataaacactaatgcc

SEQ ID NO: 19554 - DNA, 122 bp, Homo sapiens
  misc_feature (61)..(62): /note="This region represents a CpG dinucleotide"
  misc_feature (61)..(61): /note="Nucleotide may be methylated to form 5-methylcytosine"
tgtaccccttacttacctggtggcatctgagttccacttgccatctctttctacaaatgacgagaaagcacagcaagcctagctggctctgcagctttccatgggaactttgtcttcctcca

SEQ ID NO: 19555 - DNA, 122 bp, Homo sapiens
  misc_feature (61)..(62): /note="This region represents a CpG dinucleotide"
  misc_feature (61)..(61): /note="Nucleotide may be methylated to form 5-methylcytosine"
tgtttatttggttcaagctacttcacaaggacatgccctgttaattcacagtgcttttcccgaaagcctactagaactaggcctggtgagaggccctgagaaggtgtatccttttgtccaag

SEQ ID NO: 19556 - DNA, 122 bp, Homo sapiens
  misc_feature (61)..(62): /note="This region represents a CpG dinucleotide"
  misc_feature (61)..(61): /note="Nucleotide may be methylated to form 5-methylcytosine"
acgtagcagaggaatggacctgctggctgccacacgggaagttctcagaggcgtccgtggcgaagcctctgtgtcctggagctatcatggttacttccttgctgcttacttcttaaagctgt

SEQ ID NO: 19557 - DNA, 122 bp, Homo sapiens
  misc_feature (61)..(62): /note="This region represents a CpG dinucleotide"
  misc_feature (61)..(61): /note="Nucleotide may be methylated to form 5-methylcytosine"
acattttactccaaactgttgaagacagtgctttctcgttcacagaagaggcttttctagcggcacgaaagaatttggaagcggcagtgttacggtaaaaaaccgacaaggtgcctgatgaa

SEQ ID NO: 19558 - DNA, 122 bp, Homo sapiens
  misc_feature (61)..(62): /note="This region represents a CpG dinucleotide"
  misc_feature (61)..(61): /note="Nucleotide may be methylated to form 5-methylcytosine"
cctccctaccctgcttttgttctccatagcagttatcatcatgggacctactgtcagaggcgtttgaaccagagtgactccatcttgaacaggagctggggagaatgaggctgagacctgct

SEQ ID NO: 19559 - DNA, 122 bp, Homo sapiens
  misc_feature (61)..(62): /note="This region represents a CpG dinucleotide"
  misc_feature (61)..(61): /note="Nucleotide may be methylated to form 5-methylcytosine"
gcagtacctcggcgtgacgccatgacgcagccggagagagcttcacgcacaccatctcttcgttcttcctgaactctgtcacggagggggcctttgtttatttatttttggttggtgctctt

SEQ ID NO: 19560 - DNA, 122 bp, Homo sapiens
  misc_feature (61)..(62): /note="This region represents a CpG dinucleotide"
  misc_feature (61)..(61): /note="Nucleotide may be methylated to form 5-methylcytosine"
tcacatgtagaaacaagcctagagaatactgtaacacaaagttagaagggttgaggagggcgagggaagggtcaacaccttaccgctgatcgctttgctttactcctgcattttttgttcag

SEQ ID NO: 19561 - DNA, 122 bp, Homo sapiens
  misc_feature (61)..(62): /note="This region represents a CpG dinucleotide"
  misc_feature (61)..(61): /note="Nucleotide may be methylated to form 5-methylcytosine"
ccacactatgctgagcactgtgctaagccctgaagatgcagcagtgcataatgatcccttcgttcttggaacttatgtgctcatcagaagagtgtgccaacttgcttagaaataaatcaccc

SEQ ID NO: 19562 - DNA, 122 bp, Homo sapiens
  misc_feature (61)..(62): /note="This region represents a CpG dinucleotide"
  misc_feature (61)..(61): /note="Nucleotide may be methylated to form 5-methylcytosine"
gggacatcaaagaaatgcatcgttaaatcaatagcagtttgtgcatatacttgtaaattgcggttacaagttttgtgacatgggagaaaaaatactgtgtatctgatggaggaagacacata

SEQ ID NO: 19563 - DNA, 122 bp, Homo sapiens
  misc_feature (61)..(62): /note="This region represents a CpG dinucleotide"
  misc_feature (61)..(61): /note="Nucleotide may be methylated to form 5-methylcytosine"
ggcctacaacttcggctggtcttcttgaggaagaggactatggttccctttctttcttctcgccactaaattttggccgcatagtgctcctaataaatggaattgtaaagttgccggattaa

SEQ ID NO: 19564 - DNA, 122 bp, Homo sapiens
  misc_feature (61)..(62): /note="This region represents a CpG dinucleotide"
  misc_feature (61)..(61): /note="Nucleotide may be methylated to form 5-methylcytosine"
tcatccatgactttagagaacagacacaagtgtatccagctgtccacgggtggagctacccgttgggcttatgagtgacctggagtgacagctgagtcaccctgggtaagttctcagagtgg

SEQ ID NO: 19565 - DNA, 122 bp, Homo sapiens
  misc_feature (61)..(62): /note="This region represents a CpG dinucleotide"
  misc_feature (61)..(61): /note="Nucleotide may be methylated to form 5-methylcytosine"
agcatcacttacaatcagaaaagatccctgatgaaagtgcatgaaggaacacaaagcaggcgactgcacgtctatgaacacgctcacggtacggtgcacagagcaggcgacagcacgtctat

SEQ ID NO: 19566 - DNA, 122 bp, Homo sapiens
  misc_feature (61)..(62): /note="This region represents a CpG dinucleotide"
  misc_feature (61)..(61): /note="Nucleotide may be methylated to form 5-methylcytosine"
acagggcatgcaccgtggtggtggcagtgatatgttgaatccctgttcccaggggatgtccgctttctatctgcagctttaatgtttcacttaatatcctctttggctactgagcgcactcc

SEQ ID NO: 19567 - DNA, 122 bp, Homo sapiens
  misc_feature (61)..(62): /note="This region represents a CpG dinucleotide"
  misc_feature (61)..(61): /note="Nucleotide may be methylated to form 5-methylcytosine"
ggcagctgggagcagggagagggtggaggataagttgagatcagaagatgaagcacaatacggctgtactgtattttacttaggacagttggactgtctacagctcacaggctagccccagt

SEQ ID NO: 19568 - DNA, 122 bp, Homo sapiens
  misc_feature (61)..(62): /note="This region represents a CpG dinucleotide"
  misc_feature (61)..(61): /note="Nucleotide may be methylated to form 5-methylcytosine"
attgttgtgggcatgagatggcagaaagtgggatatggaaaatgttgccgtgcgccattccgaatactactgtggcttccctgcagcattactttccatattggctgttttccatttcagga

SEQ ID NO: 19569 - DNA, 122 bp, Homo sapiens
  misc_feature (61)..(62): /note="This region represents a CpG dinucleotide"
  misc_feature (61)..(61): /note="Nucleotide may be methylated to form 5-methylcytosine"
cctctttaagtgtcacctcctcctagcttaggtgcaccccttcaccaccacagcccctcccggcgccagcgtgctgcagcttctcatgcacattaatgtacataaataggaaaagtcctgcc

SEQ ID NO: 19570 - DNA, 122 bp, Homo sapiens
  misc_feature (61)..(62): /note="This region represents a CpG dinucleotide"
  misc_feature (61)..(61): /note="Nucleotide may be methylated to form 5-methylcytosine"
aggaaaggggaccaggtcacgtagaacctcgtagaccactgcagaaccttggcttacgtacgcagagacagcaggaaccactgataggtttagggagatttgaggagagggacatgatttgg

SEQ ID NO: 19571 - DNA, 122 bp, Homo sapiens
  misc_feature (61)..(62): /note="This region represents a CpG dinucleotide"
  misc_feature (61)..(61): /note="Nucleotide may be methylated to form 5-methylcytosine"
ggcttcagggaatggtgccttcattagcaccacattcttgtcaaaagagctaactaacaccgctgctctccactctaccatctatattaattttatttctgattttacagagagatactcag

SEQ ID NO: 19572 - DNA, 122 bp, Homo sapiens
  misc_feature (61)..(62): /note="This region represents a CpG dinucleotide"
  misc_feature (61)..(61): /note="Nucleotide may be methylated to form 5-methylcytosine"
agtgttttcacctattttatattccttttgagctttgtctagagagattacatgtgctaccgactggtataagaggtggtgtgaagcaatgtatgccttttaacaacagttttgccaaaagg

SEQ ID NO: 19573 - DNA, 122 bp, Homo sapiens
  misc_feature (61)..(62): /note="This region represents a CpG dinucleotide"
  misc_feature (61)..(61): /note="Nucleotide may be methylated to form 5-methylcytosine"
cattacgaaacaaaagtcatgagtcaaagaggaaattcagtctgaagttttagaatatgtcgtagtgaaatactatgtgtcagaagctgcacagtctagatgaaacagtgatctaaggaaaa

SEQ ID NO: 19574 - DNA, 122 bp, Homo sapiens
  misc_feature (61)..(62): /note="This region represents a CpG dinucleotide"
  misc_feature (61)..(61): /note="Nucleotide may be methylated to form 5-methylcytosine"
gcaatagcttttcataggtttctccacaaactccccttcatatctctagctggaaggacacggcttctctaattgactgcttggtgactcaatctctgattcaatccctcatctggaactgt

SEQ ID NO: 19575 - DNA, 122 bp, Homo sapiens
  misc_feature (61)..(62): /note="This region represents a CpG dinucleotide"
  misc_feature (61)..(61): /note="Nucleotide may be methylated to form 5-methylcytosine"
aagagcttattgttttccaggcctgggcagagacagggcccccctgccccatctctccaccgtcctaggtgtgccaagagtcaattgcctcattgctgaccctgtccagctggccatggccc

SEQ ID NO: 19576 - DNA, 122 bp, Homo sapiens
  misc_feature (61)..(62): /note="This region represents a CpG dinucleotide"
  misc_feature (61)..(61): /note="Nucleotide may be methylated to form 5-methylcytosine"
tggtggatttttttttcaacacagataaacaggaaaggagttttggttttgaaactcaaacgatttccttgctgtagccgtatctaggttgggtatcgaagaaaacaaaaataattctgggc

SEQ ID NO: 19577 - DNA, 122 bp, Homo sapiens
  misc_feature (61)..(62): /note="This region represents a CpG dinucleotide"
  misc_feature (61)..(61): /note="Nucleotide may be methylated to form 5-methylcytosine"
ggagcagcctgagatcaggttaaccctcacagcgctagatggcgggagtccacccaggtccggcacggccctggtacggattgaagttgtggacatcaatgacaacgtcccagagtttgcaa

SEQ ID NO: 19578 - DNA, 122 bp, Homo sapiens
  misc_feature (61)..(62): /note="This region represents a CpG dinucleotide"
  misc_feature (61)..(61): /note="Nucleotide may be methylated to form 5-methylcytosine"
gcttgatgcttttctgcatactctgaggggatagaacatctctcataaaacctgcacctccgctaggtagggagataagcaagaaaacaggactgaattcactgaagagcaaaacttgccta

SEQ ID NO: 19579 - DNA, 122 bp, Homo sapiens
  misc_feature (61)..(62): /note="This region represents a CpG dinucleotide"
  misc_feature (61)..(61): /note="Nucleotide may be methylated to form 5-methylcytosine"
gctagtccaggctacaccactggtccacagacatgtgagctaaataaatgtttaatgttacgatgtcttgagtcatagggtgatttgttatacagtactattgtgacaaacatgtttgagtc

SEQ ID NO: 19580 - DNA, 122 bp, Homo sapiens
  misc_feature (61)..(62): /note="This region represents a CpG dinucleotide"
  misc_feature (61)..(61): /note="Nucleotide may be methylated to form 5-methylcytosine"
tttagccacatagttatctcgatatcccatttatcctgggctgacactttgtcattagcacgctcctgctatacaatggctggttcacagacagggaaaagaggttgcattttttcagcact

SEQ ID NO: 19581 - DNA, 122 bp, Homo sapiens
  misc_feature (61)..(62): /note="This region represents a CpG dinucleotide"
  misc_feature (61)..(61): /note="Nucleotide may be methylated to form 5-methylcytosine"
gcccatgtctggatcctgattatttaccctcctggtcccagaagtcatttacgttctcaacgcttttacaatatgatgcgaagccaggttcccagtctctgcaaggccagatggttgagaac

SEQ ID NO: 19582 - DNA, 122 bp, Homo sapiens
  misc_feature (61)..(62): /note="This region represents a CpG dinucleotide"
  misc_feature (61)..(61): /note="Nucleotide may be methylated to form 5-methylcytosine"
gaggtcattcttgtgctgttggaggaatgacctatgctcaggccaggtagtcacagatgccgtctgtctgctcgagtttcattcttttgtagtaagccttgggaagttgttcctctgggttg

SEQ ID NO: 19583 - DNA, 122 bp, Homo sapiens
  misc_feature (61)..(62): /note="This region represents a CpG dinucleotide"
  misc_feature (61)..(61): /note="Nucleotide may be methylated to form 5-methylcytosine"
taagagaggatttaagaatcctatgaaaagcaaacagcaggaggccagcttatacatgatcgccacaagatagacggcttccttcttggcttctgttgtagagaactttcaactgtctcctc

SEQ ID NO: 19584 - DNA, 122 bp, Homo sapiens
  misc_feature (61)..(62): /note="This region represents a CpG dinucleotide"
  misc_feature (61)..(61): /note="Nucleotide may be methylated to form 5-methylcytosine"
gggactgctgcaagactctttggtctgtgacttgcccaagagagaagtttctgggcagaacggggagctcaggaaagaagaaagttacatccgcacaaagtttcaattataaagcccaataa

SEQ ID NO: 19585 - DNA, 122 bp, Homo sapiens
  misc_feature (61)..(62): /note="This region represents a CpG dinucleotide"
  misc_feature (61)..(61): /note="Nucleotide may be methylated to form 5-methylcytosine"
ggtgcttcggagcccgccctttctgagcttcctgggccggctctagaacaattcaggcttcgctgcgactcagacctcagctccaacatatgcattctgaagaaagatggctgagatggaca

SEQ ID NO: 19586 - DNA, 122 bp, Homo sapiens
  misc_feature (61)..(62): /note="This region represents a CpG dinucleotide"
  misc_feature (61)..(61): /note="Nucleotide may be methylated to form 5-methylcytosine"
cgcccgccttggcctcccaaagtgctgagattacaggagtgagccaccacacctggcctgcgcctctcatcttgatcctgcttgcagaggttgtgcagccaccggagccccgccagggtggg

SEQ ID NO: 19587 - DNA, 122 bp, Homo sapiens
  misc_feature (61)..(62): /note="This region represents a CpG dinucleotide"
  misc_feature (61)..(61): /note="Nucleotide may be methylated to form 5-methylcytosine"
caacccatggtcagggatctttgtctttttggttcactgctgtattccaagcacctataacgatacctagcacatagtgggttttgagtaaatattgaacgaaagaatgaacagattattcc

SEQ ID NO: 19588 - DNA, 122 bp, Homo sapiens
  misc_feature (61)..(62): /note="This region represents a CpG dinucleotide"
  misc_feature (61)..(61): /note="Nucleotide may be methylated to form 5-methylcytosine"
cacagtgtggccgcagggctgaaacgaatttcacgggaaacaagcgcacgtgaggaagcccggagcaggcccatcaggattctatttatactaaagaccttcagctaagtgagaagaggacc

SEQ ID NO: 19589 - DNA, 122 bp, Homo sapiens
  misc_feature (61)..(62): /note="This region represents a CpG dinucleotide"
  misc_feature (61)..(61): /note="Nucleotide may be methylated to form 5-methylcytosine"
caaatattgccaaagtcccttaccaacttgcttacctactgggagtgtgtaacccctctgcgcctcattttccaccaacaacattgagaaacaggatactcagtgtctctttgacacataca

SEQ ID NO: 19590 - DNA, 122 bp, Homo sapiens
  misc_feature (61)..(62): /note="This region represents a CpG dinucleotide"
  misc_feature (61)..(61): /note="Nucleotide may be methylated to form 5-methylcytosine"
caagtaatcctcccacctcggcctaacaaagtgttgggactacaggcgtaagccaccgtgcgtggccctcattagggttttgggactagagctacaaagccactgaagtaaggtggcatgac

SEQ ID NO: 19591 - DNA, 122 bp, Homo sapiens
  misc_feature (61)..(62): /note="This region represents a CpG dinucleotide"
  misc_feature (61)..(61): /note="Nucleotide may be methylated to form 5-methylcytosine"
aacatatcattgctagggagtatgatggagggaaaaagacaggttatggagggccttaaacggtatctaaggattatagatttgattatttacagatgggggagctgttgaaggctttctcg

SEQ ID NO: 19592 - DNA, 122 bp, Homo sapiens
  misc_feature (61)..(62): /note="This region represents a CpG dinucleotide"
  misc_feature (61)..(61): /note="Nucleotide may be methylated to form 5-methylcytosine"
aatatacagtacagtactgatttggcatcagaactgccttatttaatgcgcatgaccttacggtcaagaatttattggctgttctttgtgttcaacattgccaggccctgttttaattttca

SEQ ID NO: 19593 - DNA, 122 bp, Homo sapiens
  misc_feature (61)..(62): /note="This region represents a CpG dinucleotide"
  misc_feature (61)..(61): /note="Nucleotide may be methylated to form 5-methylcytosine"
agattgagatcatttttaaaggagcttgtccctacctgcttctgtaacatatctgctacacgtggaaagaaggtagccagtgaacatgcaaacaacacagacacagtgagaattgtagagaa

SEQ ID NO: 19594 - DNA, 122 bp, Homo sapiens
  misc_feature (61)..(62): /note="This region represents a CpG dinucleotide"
  misc_feature (61)..(61): /note="Nucleotide may be methylated to form 5-methylcytosine"
ataagaaagccctcagtgctacatttatgggagcattttcttaatctttctggaaatgaacgctcattggagtttgatatcctgagaagctgatgactaaccctatgctcatgtataccacc

SEQ ID NO: 19595 - DNA, 122 bp, Homo sapiens
  misc_feature (61)..(62): /note="This region represents a CpG dinucleotide"
  misc_feature (61)..(61): /note="Nucleotide may be methylated to form 5-methylcytosine"
atccctggcctggaggcaggtggaggccaagcactgccttgctcctgccccagggggaggcgctctagctctgccaagtccaagaccaacaacacacatgcgcgcgcacgcacgcacgcata

SEQ ID NO: 19596 - DNA, 122 bp, Homo sapiens
  misc_feature (61)..(62): /note="This region represents a CpG dinucleotide"
  misc_feature (61)..(61): /note="Nucleotide may be methylated to form 5-methylcytosine"
ccataattcagtcaggtcccactgggttcctcccatgacacatgggaattgtggaagttacgattcaagaggagatttgggtggggccaaatcatatcatatcagccaaaccatatcagctg

SEQ ID NO: 19597 - DNA, 122 bp, Homo sapiens
  misc_feature (61)..(62): /note="This region represents a CpG dinucleotide"
  misc_feature (61)..(61): /note="Nucleotide may be methylated to form 5-methylcytosine"
gggagtaaggggagaggaaaagagctgtttggtgggaagaggaagtcttaaacacagtcacgcccccagacacagggagggaattagagggtctcactttcaagagtcctccccattttcat

SEQ ID NO: 19598 - DNA, 122 bp, Homo sapiens
  misc_feature (61)..(62): /note="This region represents a CpG dinucleotide"
  misc_feature (61)..(61): /note="Nucleotide may be methylated to form 5-methylcytosine"
attagagttgccctcgataaattagctgagaaggaggcttgaaggaggcctgactattaacgggtaaaaaacctacaggttttaaagccatctgggcttatatattagattgtgctgtttgc

SEQ ID NO: 19599 - DNA, 122 bp, Homo sapiens
  misc_feature (61)..(62): /note="This region represents a CpG dinucleotide"
  misc_feature (61)..(61): /note="Nucleotide may be methylated to form 5-methylcytosine"
cttgcattcccctggtttgtcacaaaatccatgctgctcatcacatccaggcaggcagatcgctacaagcaaaggaaaaacagggtcaagccccacgccaagtacgtcccaacagggctgcc

SEQ ID NO: 19600 - DNA, 122 bp, Homo sapiens
  misc_feature (61)..(62): /note="This region represents a CpG dinucleotide"
  misc_feature (61)..(61): /note="Nucleotide may be methylated to form 5-methylcytosine"
tgagggctgagtccagtgagggatgagaagggcactcccattgtgagcaggtgagctgcccgctttcagtgccagagaagaagctggcttctgtacttcaggagcagcctcatgtagggtcc

SEQ ID NO: 19601 - DNA, 122 bp, Homo sapiens
  misc_feature (61)..(62): /note="This region represents a CpG dinucleotide"
  misc_feature (61)..(61): /note="Nucleotide may be methylated to form 5-methylcytosine"
cttggccaaggtcaagtagtaagaattcagactaagagttgaaactaacacaattagaagcgggtaataacaagtgcatagattagacagccagaatgtacataaaagcgtgctaggaacac

SEQ ID NO: 19602 - DNA, 122 bp, Homo sapiens
  misc_feature (61)..(62): /note="This region represents a CpG dinucleotide"
  misc_feature (61)..(61): /note="Nucleotide may be methylated to form 5-methylcytosine"
aagagatggagactggcctgtcttcttggcagagctcaggttacagttgaaataaatagacgctcctgtttctttctcttttccagttggttatatctcattgccgtttgttcattcacatg

SEQ ID NO: 19603 - DNA, 122 bp, Homo sapiens
  misc_feature (61)..(62): /note="This region represents a CpG dinucleotide"
  misc_feature (61)..(61): /note="Nucleotide may be methylated to form 5-methylcytosine"
aaatagccttaaatttgcatattaaaggaaacaactcctttaatcagataacaaaatttacgtcataaggtatgaagagaaagtctggtgagctagaggaaaattaaaacggatttaatggc

SEQ ID NO: 19604 - DNA, 122 bp, Homo sapiens
  misc_feature (61)..(62): /note="This region represents a CpG dinucleotide"
  misc_feature (61)..(61): /note="Nucleotide may be methylated to form 5-methylcytosine"
cacatccattcaggacaggaagtgcatgatgtgactcacgagcagagggaaagggaattgcgctcagctggtaaaggcaaagaaagaacaaatagaggctatagccaccaagaagaagaaga

SEQ ID NO: 19605 - DNA, 122 bp, Homo sapiens
  misc_feature (61)..(62): /note="This region represents a CpG dinucleotide"
  misc_feature (61)..(61): /note="Nucleotide may be methylated to form 5-methylcytosine"
atctcccatatgcagtcctccatgatctttctgcttccgccagttcaatgctgacaagtacgtgaccttagcagctgcctgttaaataaagtggaaccacagacaggaagaggctgggtcgc

SEQ ID NO: 19606 - DNA, 122 bp, Homo sapiens
  misc_feature (61)..(62): /note="This region represents a CpG dinucleotide"
  misc_feature (61)..(61): /note="Nucleotide may be methylated to form 5-methylcytosine"
tttacagataaggcaatgggagggccagagagggtgcctctcactcccatagtctctgagcgtgataacggtagcgccagaccagcacacaggcttcatgattttcagcagcatgttcttcc

SEQ ID NO: 19607 - DNA, 122 bp, Homo sapiens
  misc_feature (61)..(62): /note="This region represents a CpG dinucleotide"
  misc_feature (61)..(61): /note="Nucleotide may be methylated to form 5-methylcytosine"
atctccactggctataatcactgaggaattccttctgcccctaaagggttggcactcttgcgtaggatgggtgctcttgcaagatctaatcctggaaatgctctccattctccattcttttt

SEQ ID NO: 19608 - DNA, 122 bp, Homo sapiens
  misc_feature (61)..(62): /note="This region represents a CpG dinucleotide"
  misc_feature (61)..(61): /note="Nucleotide may be methylated to form 5-methylcytosine"
gtgggtcagatgcaagttagatcaaaaagaggaaggaagctttcctggggaacctcagctcgaactggcagaagaccatggatgagtgtttggggcaccattctggaagagaaaggaagaga

SEQ ID NO: 19609 - DNA, 122 bp, Homo sapiens
  misc_feature (61)..(62): /note="This region represents a CpG dinucleotide"
  misc_feature (61)..(61): /note="Nucleotide may be methylated to form 5-methylcytosine"
gggggaggactgtgggagagagagttgagcatgaaaagcctgaaactcactgtgttcaagcgccacagccatccctggtgtgctaaccacagccctggcctggagccagcccctcaactcac

SEQ ID NO: 19610 - DNA, 122 bp, Homo sapiens
  misc_feature (61)..(62): /note="This region represents a CpG dinucleotide"
  misc_feature (61)..(61): /note="Nucleotide may be methylated to form 5-methylcytosine"
agactccctgaagagtactgtaaacagttgcaatggcggccctgaccagctagtgagactcgcatttattcagtaaagattaattgacaaagacttgagtcaacaccactacggggtaactg

SEQ ID NO: 19611 - DNA, 122 bp, Homo sapiens
  misc_feature (61)..(62): /note="This region represents a CpG dinucleotide"
  misc_feature (61)..(61): /note="Nucleotide may be methylated to form 5-methylcytosine"
ccagcatggaagtcccttgtggcagcagggtctgaggctctttttccttctcacatctctcgtttccttctctggcctcttctgggtttggttctcagagctggtgagagtatggaggaagc

SEQ ID NO: 19612 - DNA, 122 bp, Homo sapiens
  misc_feature (61)..(62): /note="This region represents a CpG dinucleotide"
  misc_feature (61)..(61): /note="Nucleotide may be methylated to form 5-methylcytosine"
ttaacagcaatttctcacttacttaccgaaaaaaagaaagaaagaaagaaagaaaaaagacgccttggtacatttggaaggaagaaagctgaggatcaagagagagacttccagcctggccc

SEQ ID NO: 19613 - DNA, 122 bp, Homo sapiens
  misc_feature (61)..(62): /note="This region represents a CpG dinucleotide"
  misc_feature (61)..(61): /note="Nucleotide may be methylated to form 5-methylcytosine"
gtgtgtgattctggccccagccccagcacctctacccccacctttactacccctaggctgcgggaagaggctttgcccagcaatagtcctgatctaatggatccttgaagcacaataaacag

SEQ ID NO: 19614 - DNA, 122 bp, Homo sapiens
  misc_feature (61)..(62): /note="This region represents a CpG dinucleotide"
  misc_feature (61)..(61): /note="Nucleotide may be methylated to form 5-methylcytosine"
tccttgacagagccagtgatcacgtcagtctgtacttgttacaagataagtacagtcacgcgttgtttaacctggaggattagtgctaagaaatgtgtcgttagtcgactgtgtgaacatca

SEQ ID NO: 19615 - DNA, 122 bp, Homo sapiens
  misc_feature (61)..(62): /note="This region represents a CpG dinucleotide"
  misc_feature (61)..(61): /note="Nucleotide may be methylated to form 5-methylcytosine"
gctggactcacggcagaacctgcagagaccaaaagcgtacccactcgcctgtagcaaccacgtaaaggaatgaggggtattggacacaaactgaattcacaccaagctggagacaccctgag

SEQ ID NO: 19616 - DNA, 122 bp, Homo sapiens
  misc_feature (61)..(62): /note="This region represents a CpG dinucleotide"
  misc_feature (61)..(61): /note="Nucleotide may be methylated to form 5-methylcytosine"
gataaagtagctgaaacatgtacccgcaggtaacccaatgagtcgaatcagacttgttagcgctgtgttggctaaatgttgaaagaggtttactaaaaatgacaattcacgttttggaacaa

SEQ ID NO: 19617 - DNA, 122 bp, Homo sapiens
  misc_feature (61)..(62): /note="This region represents a CpG dinucleotide"
  misc_feature (61)..(61): /note="Nucleotide may be methylated to form 5-methylcytosine"
tctcagagcagtcagtgagtcaactgcgaaggcgctgagtaacgaactacgagatctgagcggcatctcacacaggacactgaagaaaggcattttgtagacggatgactgccctgccagtg

SEQ ID NO: 19618 - DNA, 122 bp, Homo sapiens
  misc_feature (61)..(62): /note="This region represents a CpG dinucleotide"
  misc_feature (61)..(61): /note="Nucleotide may be methylated to form 5-methylcytosine"
atagtgaactgtcacccaactgggtgtctaaacagactgtaacgtgctcttgtaacaggtcgctgagtctcagccaatcccaggtggtcagctgttaaactgggttcaaataaggcaaacgc

SEQ ID NO: 19619 - DNA, 122 bp, Homo sapiens
  misc_feature (61)..(62): /note="This region represents a CpG dinucleotide"
  misc_feature (61)..(61): /note="Nucleotide may be methylated to form 5-methylcytosine"
ttaaccaggatgttaaattttcacccacacctctggcttaaccaaatgttactgtgatagcgtggtatctgacacaattaatctaatacattatgagtaaagttgctatctggatgcacaat

SEQ ID NO: 19620 - DNA, 122 bp, Homo sapiens
  misc_feature (61)..(62): /note="This region represents a CpG dinucleotide"
  misc_feature (61)..(61): /note="Nucleotide may be methylated to form 5-methylcytosine"
ttcctttctacccatacctttgccttaatacactcaagacatgtatggacaagctctaagcggtctaaggtgaacaaaagaaaagggaaggagaataaacaagaccaactgtttctgtttgc

SEQ ID NO: 19621 - DNA, 122 bp, Homo sapiens
  misc_feature (61)..(62): /note="This region represents a CpG dinucleotide"
  misc_feature (61)..(61): /note="Nucleotide may be methylated to form 5-methylcytosine"
atatgaatgagatttataaatcaacaccactcaatgacacataaaccctaaagacagtagcgaaataacattacagttcaaaagcattgagtaaataagacgtcagatatgctcaagagaat

SEQ ID NO: 19622 - DNA, 122 bp, Homo sapiens
  misc_feature (61)..(62): /note="This region represents a CpG dinucleotide"
  misc_feature (61)..(61): /note="Nucleotide may be methylated to form 5-methylcytosine"
aacaaactcatttgagggcacgtctgccttgaactgaggcaaacttccttaaaggggcaccgtccaattgaaatagaattggagctacaaagatgagccatgtgtgcatttcgaaatttcct

SEQ ID NO: 19623 - DNA, 122 bp, Homo sapiens
  misc_feature (61)..(62): /note="This region represents a CpG dinucleotide"
  misc_feature (61)..(61): /note="Nucleotide may be methylated to form 5-methylcytosine"
accatgaccatgaccacgatcattggcatgaccatttgtttggacaaataccagtctagacgttgatgtgaagtattttgtagatgcagttaagatataccaccagttgactttaagtaaag

SEQ ID NO: 19624 - DNA, 122 bp, Homo sapiens
  misc_feature (61)..(62): /note="This region represents a CpG dinucleotide"
  misc_feature (61)..(61): /note="Nucleotide may be methylated to form 5-methylcytosine"
cagcactttgtccatttatgtaacaaatgtttgtttacatataggctgagccaagttacacgttaggtcccacggctaactcaatatggtccatagcagatgagccctgccagcaacttgtc

SEQ ID NO: 19625 - DNA, 122 bp, Homo sapiens
  misc_feature (61)..(62): /note="This region represents a CpG dinucleotide"
  misc_feature (61)..(61): /note="Nucleotide may be methylated to form 5-methylcytosine"
tcacatggctctcccagggctgtcacaccccaggccaacattcacctgtcctgactatcccggggccaggtatcagacaaaaagggcagcccctatcctgagagccactgaaattactcaag

SEQ ID NO: 19626 - DNA, 122 bp, Homo sapiens
  misc_feature (61)..(62): /note="This region represents a CpG dinucleotide"
  misc_feature (61)..(61): /note="Nucleotide may be methylated to form 5-methylcytosine"
atcacccatgaagcttcattcaactccctcttgcatcatctaatagagggtccgaccatacgacatctggtttgtctgagacagccctggtatatataatttttcctggtgtaaatgtgtca

SEQ ID NO: 19627 - DNA, 122 bp, Homo sapiens
  misc_feature (61)..(62): /note="This region represents a CpG dinucleotide"
  misc_feature (61)..(61): /note="Nucleotide may be methylated to form 5-methylcytosine"
tatggttacgttaggtgcaccaatgacttcaaattcttctcatgtttccttgccagcttacggttggtttgcaggagggaggctttttctcagtggttatcctccatccataccctcagttt

SEQ ID NO: 19628 - DNA, 122 bp, Homo sapiens
  misc_feature (61)..(62): /note="This region represents a CpG dinucleotide"
  misc_feature (61)..(61): /note="Nucleotide may be methylated to form 5-methylcytosine"
ctagctccattctcagacattctggcataatagatctgggatacaacttggtcattaggacgttaaaaagctccccagctggttctagtgtgcagccaagtttggaacccactgtattatca

SEQ ID NO: 19629 - DNA, 122 bp, Homo sapiens
  misc_feature (61)..(62): /note="This region represents a CpG dinucleotide"
  misc_feature (61)..(61): /note="Nucleotide may be methylated to form 5-methylcytosine"
tccaggatactgtttctgatttgatgcaactatgtcatcttctacctctcatctcaaaaccgtattgcctttaaaatcacatggggcccactgattatctggtatactcaaagtgttctaca

SEQ ID NO: 19630 - DNA, 122 bp, Homo sapiens
  misc_feature (61)..(62): /note="This region represents a CpG dinucleotide"
  misc_feature (61)..(61): /note="Nucleotide may be methylated to form 5-methylcytosine"
agtgtctgcactgcccagaccccacactcatctgagtcctttcccacacttcctccccgccgtcttgcttgcttctgaaagtcagcaggcaccacgaggaaggggatttctctgtcagccta

SEQ ID NO: 19631 - DNA, 122 bp, Homo sapiens
  misc_feature (61)..(62): /note="This region represents a CpG dinucleotide"
  misc_feature (61)..(61): /note="Nucleotide may be methylated to form 5-methylcytosine"
atgtttgcttttgttgtcattcgggtcctaaatctcccagtttgctcctgccctgcttttcgttcactctccctgccttactatctcattctgtagagagcccttctcaaatctctgtcaat

SEQ ID NO: 19632 - DNA, 122 bp, Homo sapiens
  misc_feature (61)..(62): /note="This region represents a CpG dinucleotide"
  misc_feature (61)..(61): /note="Nucleotide may be methylated to form 5-methylcytosine"
tgcatattatggaataggcatgtccagacagcatgatacttagaatcagactttcccaggcgccctacagaaatttgtttttctatgtcaagaatgaataaaacacatctgctttaaaattc

SEQ ID NO: 19633 - DNA, 122 bp, Homo sapiens
  misc_feature (61)..(62): /note="This region represents a CpG dinucleotide"
  misc_feature (61)..(61): /note="Nucleotide may be methylated to form 5-methylcytosine"
gtcataatgataataatccccaaaacaacatgtgtcagatactgtgctgaatactctactcgctttcctcattcatttgatagtaagaggttggtattgtaacaagacgcgttttgcagatg

SEQ ID NO: 19634 - DNA, 122 bp, Homo sapiens
  misc_feature (61)..(62): /note="This region represents a CpG dinucleotide"
  misc_feature (61)..(61): /note="Nucleotide may be methylated to form 5-methylcytosine"
gtcatgagaagactgagatggggacagtgtccctgactcagggaacagctcgtgccaagtcggatgagatacttgggtgtggctgcagtttagggcttgcacatgggcagctcagtactggg

SEQ ID NO: 19635 - DNA, 122 bp, Homo sapiens
  misc_feature (61)..(62): /note="This region represents a CpG dinucleotide"
  misc_feature (61)..(61): /note="Nucleotide may be methylated to form 5-methylcytosine"
tgttttcagagttatgaacaagaaaaatatacccttcaaagagaagttgaactcaagagtcgaatgttagaaagtttgagctgcgaatgtgaagctattaaacaacaacaaaaaatgcacct

SEQ ID NO: 19636 - DNA, 122 bp, Homo sapiens
  misc_feature (61)..(62): /note="This region represents a CpG dinucleotide"
  misc_feature (61)..(61): /note="Nucleotide may be methylated to form 5-methylcytosine"
aatgaataaacgaacttaaacaagggcatgagacaatcagaaactcctccatgaggcatccgtttcccacttgtaatggtgtttccacgccaagcctcacctcccctagctgactctcattt

SEQ ID NO: 19637 - DNA, 122 bp, Homo sapiens
  misc_feature (61)..(62): /note="This region represents a CpG dinucleotide"
  misc_feature (61)..(61): /note="Nucleotide may be methylated to form 5-methylcytosine"
tttcctggagttacagaagaattgaccagtgtgtcagtgtctttcatgtacattaatgggcgatagtattggtagtggttaatataatagcatgggttctggaaccagtctgccaggattta

SEQ ID NO: 19638 - DNA, 122 bp, Homo sapiens
  misc_feature (61)..(62): /note="This region represents a CpG dinucleotide"
  misc_feature (61)..(61): /note="Nucleotide may be methylated to form 5-methylcytosine"
aatccaaaggtaggtctctagtgagggacagtagggctctagtcattccatcgatgtgatcgctgggcaaagggagggtggaggaccttgggctgacctcagggatggtgccagagagaacg

SEQ ID NO: 19639 - DNA, 122 bp, Homo sapiens
  misc_feature (61)..(62): /note="This region represents a CpG dinucleotide"
  misc_feature (61)..(61): /note="Nucleotide may be methylated to form 5-methylcytosine"
tgacattttgtttcattaaagaagctaatagtcaaaccaagaacttccagctaatcattccgtgtcttctcacacggagtgcttctgaaccagttttttcacctcctgttcttatacatttg

SEQ ID NO: 19640 - DNA, 122 bp, Homo sapiens
  misc_feature (61)..(62): /note="This region represents a CpG dinucleotide"
  misc_feature (61)..(61): /note="Nucleotide may be methylated to form 5-methylcytosine"
agggtcaggcagagaggaatgctggggtgggtgagcttctattttatatggggtaatctgcggaaattgctcggataagatgccatcagaacagagacctgaaggaagtgaaaagtcatgca

SEQ ID NO: 19641 - DNA, 122 bp, Homo sapiens
  misc_feature (61)..(62): /note="This region represents a CpG dinucleotide"
  misc_feature (61)..(61): /note="Nucleotide may be methylated to form 5-methylcytosine"
tcctggggaaaatttcagcagctggggccatgtaatttaaaacctctgaaaagtgtgctgcggtccgtgcacagcattagtataacgtgagggctgaatgcagcccattctctggagaactt

SEQ ID NO: 19642 - DNA, 122 bp, Homo sapiens
  misc_feature (61)..(62): /note="This region represents a CpG dinucleotide"
  misc_feature (61)..(61): /note="Nucleotide may be methylated to form 5-methylcytosine"
tttgcaataatttattgagcaagtactatgtgcaagaccttgtgctatgtactaggaacacgaaaggggatatgacacagtctgtgccttcagagctcataatgcattgggtaagatgggtg

SEQ ID NO: 19643 - DNA, 122 bp, Homo sapiens
  misc_feature (61)..(62): /note="This region represents a CpG dinucleotide"
  misc_feature (61)..(61): /note="Nucleotide may be methylated to form 5-methylcytosine"
ctttgtttttcagtgtagatgataattgcaggagactgatgtagtcctcagcacaggccacgaagagactgttagaaggaaagtggaggaagattgattattctgatgactcttcaccatgt

SEQ ID NO: 19644 - DNA, 122 bp, Homo sapiens
  misc_feature (61)..(62): /note="This region represents a CpG dinucleotide"
  misc_feature (61)..(61): /note="Nucleotide may be methylated to form 5-methylcytosine"
taattgactcacttaaggtcatatgtgacaatcattcgtttaatgcatatttattttctacgtgtgccagacactgtaactaaatgctgggagttaaaggattcacagtctggggaagcaca

SEQ ID NO: 19645 - DNA, 122 bp, Homo sapiens
  misc_feature (61)..(62): /note="This region represents a CpG dinucleotide"
  misc_feature (61)..(61): /note="Nucleotide may be methylated to form 5-methylcytosine"
ctatctggactatactgtcaggaggtgaaagagtcaccttctcttccttgacgctactggcgcacacacagcagctatcagcacctgggatcaagcacaccagagaaggaaatacacaggaa

SEQ ID NO: 19646 - DNA, 122 bp, Homo sapiens
  misc_feature (61)..(62): /note="This region represents a CpG dinucleotide"
  misc_feature (61)..(61): /note="Nucleotide may be methylated to form 5-methylcytosine"
gcctggtggtggtggaggacctgcactctggcgcccagcagcactggtccggccactctgcggagatctccacgctggccctcagccacagtgcccaggtgcccgcctgcatcgccctcctc

SEQ ID NO: 19647 - DNA, 122 bp, Homo sapiens
  misc_feature (61)..(62): /note="This region represents a CpG dinucleotide"
  misc_feature (61)..(61): /note="Nucleotide may be methylated to form 5-methylcytosine"
tgacaaagtatctgaacttctgcttaagacaaaggacacaattacgcaaaaagctatgcacgggaagataacatggcaggaatgaaaacagctatcaataaggatagtaatattgtgggtga

SEQ ID NO: 19648 - DNA, 122 bp, Homo sapiens
  misc_feature (61)..(62): /note="This region represents a CpG dinucleotide"
  misc_feature (61)..(61): /note="Nucleotide may be methylated to form 5-methylcytosine"
tcccctgctcgtgaaccttatgctccagtctttggaactaattgctactcctagagagcccgtcactcagaattgctgacactgcttactccactggaaatgtccttcccaccttctctatc

SEQ ID NO: 19649 - DNA, 122 bp, Homo sapiens
  misc_feature (61)..(62): /note="This region represents a CpG dinucleotide"
  misc_feature (61)..(61): /note="Nucleotide may be methylated to form 5-methylcytosine"
accctaaaaaggaagtgttattattatctctattttactgatgaggaaacagaggaagtacgattaagcaacttatcccagatcatacactcaagtaagcagtagagttgggaatcaaaccc

SEQ ID NO: 19650 - DNA, 122 bp, Homo sapiens
  misc_feature (61)..(62): /note="This region represents a CpG dinucleotide"
  misc_feature (61)..(61): /note="Nucleotide may be methylated to form 5-methylcytosine"
caggatttaaacctagctgtctggcttcagaaccaaagcttttaaccaactatgccagtacgtaatgaagcacaaaggagcttataaaaaggcacaccaaatctatcagagaagatgcagag

SEQ ID NO: 19651 - DNA, 122 bp, Homo sapiens
  misc_feature (61)..(62): /note="This region represents a CpG dinucleotide"
  misc_feature (61)..(61): /note="Nucleotide may be methylated to form 5-methylcytosine"
tcctccaggcccacagtttcttaaaggtctattcatcaacatgttaataatagattcttacgggagtaatgatatataataatgacagtaataagacctctttgtacttacaccctgtgttg

SEQ ID NO: 19652 - DNA, 122 bp, Homo sapiens
  misc_feature (61)..(62): /note="This region represents a CpG dinucleotide"
  misc_feature (61)..(61): /note="Nucleotide may be methylated to form 5-methylcytosine"
atgcacccctttttgaatgactgaatctaacatgaatgatttttacttgttgccaacttacgtgccttgaaatcctgagacatgtcctttcatgttgaattttccttaggaattaaagaaat

SEQ ID NO: 19653 - DNA, 122 bp, Homo sapiens
  misc_feature (61)..(62): /note="This region represents a CpG dinucleotide"
  misc_feature (61)..(61): /note="Nucleotide may be methylated to form 5-methylcytosine"
tcactaaccaagcatctttaatccaagccaaattacagaactctctaacttagaggtgatcgtccatacggcagatcattacaacatgaaaaacgtaagctaagatgttgaacacagccaga

SEQ ID NO: 19654 - DNA, 122 bp, Homo sapiens
  misc_feature (61)..(62): /note="This region represents a CpG dinucleotide"
  misc_feature (61)..(61): /note="Nucleotide may be methylated to form 5-methylcytosine"
cattttattgtgcaatattattacaccactttacaaatagaccatttattccaggctgaccgtaaaagtcattcccggctgggtgcagtggctcaagcctgtaatcccaatactttgggagt

SEQ ID NO: 19655 - DNA, 122 bp, Homo sapiens
  misc_feature (61)..(62): /note="This region represents a CpG dinucleotide"
  misc_feature (61)..(61): /note="Nucleotide may be methylated to form 5-methylcytosine"
cccaattaagtatttcctagagagagcagttgatctcttttgtctgaaactgatttttgccgtgctaagctggcaaaatatctgaggtaataactttaatgttgaagtacaatgaaagttcc

SEQ ID NO: 19656 - DNA, 122 bp, Homo sapiens
  misc_feature (61)..(62): /note="This region represents a CpG dinucleotide"
  misc_feature (61)..(61): /note="Nucleotide may be methylated to form 5-methylcytosine"
atccttttctcaaggtggtgagtagaaatctaatgtgtgccttccttgtaatcatccttgcgtatgacaaaggtgtcttaagactttagtgtagcagttactaggaacagaacaggaaatgc

SEQ ID NO: 19657 - DNA, 122 bp, Homo sapiens
  misc_feature (61)..(62): /note="This region represents a CpG dinucleotide"
  misc_feature (61)..(61): /note="Nucleotide may be methylated to form 5-methylcytosine"
tggggagacactgagaggaagaaagggctgagggcatcctggccaggcgcatggcaccagcgctgcctacctacccataccacacccagcacaaggctgggcccaagtgagtgctgctgtcc

SEQ ID NO: 19658 - DNA, 122 bp, Homo sapiens
  misc_feature (61)..(62): /note="This region represents a CpG dinucleotide"
  misc_feature (61)..(61): /note="Nucleotide may be methylated to form 5-methylcytosine"
cccataaatctggctgggccctgctgatcctgtttaccagattagtggactgggtgtctccgtataaatcacccagggtgatttacagggaggccctggaaatttcgaagtcccgactgact

SEQ ID NO: 19659 - DNA, 122 bp, Homo sapiens
  misc_feature (61)..(62): /note="This region represents a CpG dinucleotide"
  misc_feature (61)..(61): /note="Nucleotide may be methylated to form 5-methylcytosine"
acatgcttgtcaggtgagtgtgcttttccctctcatgagttcgctgaattaaagggaaagcgtgttgtgtgacatggagtcactgagtcattaacctagtcttatgggaatttggcttacac

SEQ ID NO: 19660 - DNA, 122 bp, Homo sapiens
  misc_feature (61)..(62): /note="This region represents a CpG dinucleotide"
  misc_feature (61)..(61): /note="Nucleotide may be methylated to form 5-methylcytosine"
attcagaagttctcccattccttctgttcttctctagtgtacaagaacttaactaattttcgtatttgaaattggtctccattggtgaacagtcatgtatgtctaagaatatttaatagcat

SEQ ID NO: 19661 - DNA, 122 bp, Homo sapiens
  misc_feature (61)..(62): /note="This region represents a CpG dinucleotide"
  misc_feature (61)..(61): /note="Nucleotide may be methylated to form 5-methylcytosine"
ggacacggtgatggcaggagagcaaaggaagtgggcagattctggctatacttttgcacgcgagacagtgggacttgccagcttgagcaaacagatgaacagaaatatttccaagatgcaga

SEQ ID NO: 19662 - DNA, 122 bp, Homo sapiens
  misc_feature (61)..(62): /note="This region represents a CpG dinucleotide"
  misc_feature (61)..(61): /note="Nucleotide may be methylated to form 5-methylcytosine"
ggcatgacttcaggccattatgcagctttatgtaataatctacacaacccctaatatgtacgtatcaggatctttcatgtgatgtgaaaatgaaagccacttccttaacaaccaggaaacac

SEQ ID NO: 19663 - DNA, 122 bp, Homo sapiens
  misc_feature (61)..(62): /note="This region represents a CpG dinucleotide"
  misc_feature (61)..(61): /note="Nucleotide may be methylated to form 5-methylcytosine"
tctgttttcaaatacgtctgctagatacgaagtttctaccgactcagcacaatataattacgtaatgcatccattcacccatttcatactgagaaatatgcaatagttttctccagtgataa

SEQ ID NO: 19664 - DNA, 122 bp, Homo sapiens
  misc_feature (61)..(62): /note="This region represents a CpG dinucleotide"
  misc_feature (61)..(61): /note="Nucleotide may be methylated to form 5-methylcytosine"
gtttagggctataacttgaacaaacagagttaacaatctaaaaatcagctccaggccaggcgcagcggctcacacctgtaatcccagcactttgggaggtcgaagcaggtggatcaccctga

SEQ ID NO: 19665 - DNA, 122 bp, Homo sapiens
  misc_feature (61)..(62): /note="This region represents a CpG dinucleotide"
  misc_feature (61)..(61): /note="Nucleotide may be methylated to form 5-methylcytosine"
acagcaagagctaaactcaaggctcaggtgtggaaacaaatttggcttagttttccccttcgcttcttttatgggagtatttctctagtgtcattcttagaacagctgcatcagaatcttgg

SEQ ID NO: 19666 - DNA, 122 bp, Homo sapiens
  misc_feature (61)..(62): /note="This region represents a CpG dinucleotide"
  misc_feature (61)..(61): /note="Nucleotide may be methylated to form 5-methylcytosine"
tgatgattcaggaccggtggagaggcctggggaacctctagcagggcagcccactgaatgcggttgtcactcagagcctgtccatgtgcttggatctgaacaggaagagaggttttatttat

SEQ ID NO: 19667 - DNA, 122 bp, Homo sapiens
  misc_feature (61)..(62): /note="This region represents a CpG dinucleotide"
  misc_feature (61)..(61): /note="Nucleotide may be methylated to form 5-methylcytosine"
actatactaattatatagttgcatgacgactgatttccctaatgatggctaggagttacacgatcattaaatatagcctccatgtttatatgtgttttgaagtacagtattacccccttatc

SEQ ID NO: 19668 - DNA, 122 bp, Homo sapiens
  misc_feature (61)..(62): /note="This region represents a CpG dinucleotide"
  misc_feature (61)..(61): /note="Nucleotide may be methylated to form 5-methylcytosine"
gacaggcagaagtctgagtcagaaattcagctatagaagagcgtgactttcatccctgctcgccctttgaggtatggctggacacagctcagaaaggtcttggatttcaatttgtctaggaa

SEQ ID NO: 19669 - DNA, 122 bp, Homo sapiens
  misc_feature (61)..(62): /note="This region represents a CpG dinucleotide"
  misc_feature (61)..(61): /note="Nucleotide may be methylated to form 5-methylcytosine"
gagcgtgtccaccctgtcatttcccttctttcgcaaatagtcctggtgggcaccaggttccgtgagcagtcagtgctgagtgtcctcataggtagtactgtgttaagggccctacctgtggg

SEQ ID NO: 19670 - DNA, 122 bp, Homo sapiens
  misc_feature (61)..(62): /note="This region represents a CpG dinucleotide"
  misc_feature (61)..(61): /note="Nucleotide may be methylated to form 5-methylcytosine"
aacctttggggccaggctcaaactgagaatttgtggacacctcagagtcccttgcctgatcgccggcctctgaccacagcctgtgcccagcacttcctgtcttctctcttgcagtctcagct

SEQ ID NO: 19671 - DNA, 122 bp, Homo sapiens
  misc_feature (61)..(62): /note="This region represents a CpG dinucleotide"
  misc_feature (61)..(61): /note="Nucleotide may be methylated to form 5-methylcytosine"
aaggaacatttaccaagatgtgcagagctttgtgggtggcacagagaccttgtttttgtccgtgcttagacaaaaatcatgaagagaaggcccggcatggtggctcacacctgtaatcacag

SEQ ID NO: 19672 - DNA, 122 bp, Homo sapiens
  misc_feature (61)..(62): /note="This region represents a CpG dinucleotide"
  misc_feature (61)..(61): /note="Nucleotide may be methylated to form 5-methylcytosine"
catataatcacttccttattctgtgacatttttggtggctttgcttccctgactgaacaccgactgataaaatggcagaggaggaaaaacaatttccctctacctttctaagttcagcagct

SEQ ID NO: 19673 - DNA, 122 bp, Homo sapiens
  misc_feature (61)..(62): /note="This region represents a CpG dinucleotide"
  misc_feature (61)..(61): /note="Nucleotide may be methylated to form 5-methylcytosine"
ctgttgtgccacctcaggcactatatccagctccaacaaacactgaaggcgtcagggtggcgagatatgtccaagcgacataccacccatgctgtcaccgagttgggctccaagcacctgtg

SEQ ID NO: 19674 - DNA, 122 bp, Homo sapiens
  misc_feature (61)..(62): /note="This region represents a CpG dinucleotide"
  misc_feature (61)..(61): /note="Nucleotide may be methylated to form 5-methylcytosine"
ccctcaaatcactcaattgctgcaaaaccccacttactcaagtctgaagtgtttggagaacgcagcttccctcgtctttgttttcctacccacacccttctgcctttagacacacactgaat

SEQ ID NO: 19675 - DNA, 122 bp, Homo sapiens
  misc_feature (61)..(62): /note="This region represents a CpG dinucleotide"
  misc_feature (61)..(61): /note="Nucleotide may be methylated to form 5-methylcytosine"
tttcaaaacaaacaaaaaaacaaacccacagcagtgctctcctgagtatgcagcctgcagcgtgagtgactacacaggttgcacagccatgaagctggccccgctaatctctctgtaagaat

SEQ ID NO: 19676 - DNA, 122 bp, Homo sapiens
  misc_feature (61)..(62): /note="This region represents a CpG dinucleotide"
  misc_feature (61)..(61): /note="Nucleotide may be methylated to form 5-methylcytosine"
taccattttgcataacctacgttactcatctttctttaatttgtgcatatttgtaaacaacgttctattaattcagcctgccatccactacagtgtaatcttaggaaggcagagcaagaatt

SEQ ID NO: 19677 - DNA, 122 bp, Homo sapiens
  misc_feature (61)..(62): /note="This region represents a CpG dinucleotide"
  misc_feature (61)..(61): /note="Nucleotide may be methylated to form 5-methylcytosine"
atagccaaagccaagccagaagtctgggaacacatcacatgccggtgaagacagcaaagacgtcactggtgtacagcaatcatcaaccttgcattgccaatagcagctgtgggctgtaggtt

SEQ ID NO: 19678 - DNA, 122 bp, Homo sapiens
  misc_feature (61)..(62): /note="This region represents a CpG dinucleotide"
  misc_feature (61)..(61): /note="Nucleotide may be methylated to form 5-methylcytosine"
agaagctcttaatggaaagaaacagacatataaagtgacaatatttataatacaggtggacgattctcagaatgtaggtatgtacaagtagcaactggaacagagagaaaggagtgtagagg

SEQ ID NO: 19679 - DNA, 122 bp, Homo sapiens
  misc_feature (61)..(62): /note="This region represents a CpG dinucleotide"
  misc_feature (61)..(61): /note="Nucleotide may be methylated to form 5-methylcytosine"
aacgcagctgtgcagtgcagtcctctgcagagcttcaaaaaccccatgcccaatgccagccgtgaggattctgcctcactcagcctggggcaggccccagtaccgggaattttcacagggaa

SEQ ID NO: 19680 - DNA, 122 bp, Homo sapiens
  misc_feature (61)..(62): /note="This region represents a CpG dinucleotide"
  misc_feature (61)..(61): /note="Nucleotide may be methylated to form 5-methylcytosine"
tccggttactgactctgtggctgctgcctcccacaacgctgtgcttgcagaccccaggagcgctggctgtcccttcacttcctgaacatgtggatgtgtgctttgggttcttgacctcagct

SEQ ID NO: 19681 - DNA, 122 bp, Homo sapiens
  misc_feature (61)..(62): /note="This region represents a CpG dinucleotide"
  misc_feature (61)..(61): /note="Nucleotide may be methylated to form 5-methylcytosine"
tgtggttcaaccaggcaagatcatccggtgaaagaaccagtccctgggccccaaggatgccggggaaacaggaccttctcctttcctggagctggtttagctggatatgggagggggtttgg

SEQ ID NO: 19682 - DNA, 122 bp, Homo sapiens
  misc_feature (61)..(62): /note="This region represents a CpG dinucleotide"
  misc_feature (61)..(61): /note="Nucleotide may be methylated to form 5-methylcytosine"
cctcctcccaaaggtcagccaatcctccaaacacccccatctaccacattcctgagcagacgggcctgtgcttcaggcaggtaataggtaaaataaagcctgctatccttcaccccacaagg

SEQ ID NO: 19683 - DNA, 122 bp, Homo sapiens
  misc_feature (61)..(62): /note="This region represents a CpG dinucleotide"
  misc_feature (61)..(61): /note="Nucleotide may be methylated to form 5-methylcytosine"
aggggaccatttatgctgaattagcctttggatttttcttcttagtgacagcaaaacttccgtgacagcaaacaagtaaaccacaggaacatccctggtctgctcagcacagcaggctcttg

SEQ ID NO: 19684 - DNA, 122 bp, Homo sapiens
  misc_feature (61)..(62): /note="This region represents a CpG dinucleotide"
  misc_feature (61)..(61): /note="Nucleotide may be methylated to form 5-methylcytosine"
tcatatgagtaaatatgacccatatgagtaaatatgaccttttgattacttcacttcgtgcggatcagggaagactttctaaggaagtgataggcaattcagcaatgtgactacctggagaa

SEQ ID NO: 19685 - DNA, 122 bp, Homo sapiens
  misc_feature (61)..(62): /note="This region represents a CpG dinucleotide"
  misc_feature (61)..(61): /note="Nucleotide may be methylated to form 5-methylcytosine"
ttctcagttaagctttatactggtggtgcagctaagagtagcatcacatcagcaatagctcgtaataaaaaataatcatgggatgaacttgatgtatactcagcatcagaagaaccaacaat

SEQ ID NO: 19686 - DNA, 122 bp, Homo sapiens
  misc_feature (61)..(62): /note="This region represents a CpG dinucleotide"
  misc_feature (61)..(61): /note="Nucleotide may be methylated to form 5-methylcytosine"
ccacaaccactgcactgcctgggcttccccagccctctccaaggcccgctttcactgtaccggggttttctatttatggatccgccctgctacccgccactcccacaacccccacccataga

SEQ ID NO: 19687 - DNA, 122 bp, Homo sapiens
  misc_feature (61)..(62): /note="This region represents a CpG dinucleotide"
  misc_feature (61)..(61): /note="Nucleotide may be methylated to form 5-methylcytosine"
tccagacagcccctaatctactgcttagtccccaccctgagctcctccgtcctcagggcccgaatccactcacgtcttcctggcagggttgtaaggaaagggtagggctctccttgggaggt

SEQ ID NO: 19688 - DNA, 122 bp, Homo sapiens
  misc_feature (61)..(62): /note="This region represents a CpG dinucleotide"
  misc_feature (61)..(61): /note="Nucleotide may be methylated to form 5-methylcytosine"
agagtgagttagttcccagtgtggcctcgtgtgtgcttttggccgcatcgtttccagtttcgccatccccaaagaggatcatctcccaggaagcttactggtccaaggaggatgagacaccc

SEQ ID NO: 19689 - DNA, 122 bp, Homo sapiens
  misc_feature (61)..(62): /note="This region represents a CpG dinucleotide"
  misc_feature (61)..(61): /note="Nucleotide may be methylated to form 5-methylcytosine"
agatgagtgctctgaaggaaaggaacaggttctcagagagtatacagtgaagaaggccaacgctgagtgaggagtcagcaggagttctctgaggaagtcactgagaatgatcaggcttctgg

SEQ ID NO: 19690 - DNA, 122 bp, Homo sapiens
  misc_feature (61)..(62): /note="This region represents a CpG dinucleotide"
  misc_feature (61)..(61): /note="Nucleotide may be methylated to form 5-methylcytosine"
ctgcagttgtgtctggaaagagcaggcaatcaaatgggattttggagctgaatcattcaccgcccagctagcaatgtggacaccttgcacagatggtgtttccattgttaaaacttccactg

SEQ ID NO: 19691 - DNA, 122 bp, Homo sapiens
  misc_feature (61)..(62): /note="This region represents a CpG dinucleotide"
  misc_feature (61)..(61): /note="Nucleotide may be methylated to form 5-methylcytosine"
cgcctgccaacactgctccccacaagactaagtcctgcagcctcagcccagaaggacccgcgcctacccccacacggaggtcatgttcagccacaccccagtgaaccctggcgacccacccc

SEQ ID NO: 19692 - DNA, 122 bp, Homo sapiens
  misc_feature (61)..(62): /note="This region represents a CpG dinucleotide"
  misc_feature (61)..(61): /note="Nucleotide may be methylated to form 5-methylcytosine"
agatagagaggaaaagaggtccttggaaagttttcgtcccttttaaagcagctccagaaacgtttcttgtctaacaggaaagcccggctcttagaactgggctggcaacctttgatatgcaa

SEQ ID NO: 19693 - DNA, 122 bp, Homo sapiens
  misc_feature (61)..(62): /note="This region represents a CpG dinucleotide"
  misc_feature (61)..(61): /note="Nucleotide may be methylated to form 5-methylcytosine"
tccctgtcctcaaaacaaacaacattcctcagagagcactctgttaccaggacagagagacgtattagagctagaatactgcaaagggaaatgtggtcatctcattttttttcacagttctt

SEQ ID NO: 19694 - DNA, 122 bp, Homo sapiens
  misc_feature (61)..(62): /note="This region represents a CpG dinucleotide"
  misc_feature (61)..(61): /note="Nucleotide may be methylated to form 5-methylcytosine"
cattcagctccacgcccagtccaccaggaaatcctgccgctccgccgtcagaatcctctccgcatgtccaccccgtccccaaagtggggccaccctcgtgtctccagtggagcagaggagcc

SEQ ID NO: 19695 - DNA, 122 bp, Homo sapiens
  misc_feature (61)..(62): /note="This region represents a CpG dinucleotide"
  misc_feature (61)..(61): /note="Nucleotide may be methylated to form 5-methylcytosine"
ggtgtggaaattactaattttagagtcagattcccctgggttccagccttagctcagtcacgtggaagctgtgcctcactgggcagttacttcacctctgtgatgttttttggaacaccagc

SEQ ID NO: 19696 - DNA, 122 bp, Homo sapiens
  misc_feature (61)..(62): /note="This region represents a CpG dinucleotide"
  misc_feature (61)..(61): /note="Nucleotide may be methylated to form 5-methylcytosine"
ggtgggaggattgcttgagaccttgtctcaaaaaaataaaaaaaaattacttaaaaaaatcgtaacatgggtattctccattacagttacccttagggaagtgtgtccatattgatttgtaa

SEQ ID NO: 19697 - DNA, 122 bp, Homo sapiens
  misc_feature (61)..(62): /note="This region represents a CpG dinucleotide"
  misc_feature (61)..(61): /note="Nucleotide may be methylated to form 5-methylcytosine"
ggcagcttaagaagcctcactggccaactgggaaacatccgctgtccaaatattataggacggactattcaaccgcatccctgagctctggtgaaataggcatgcagtataatggaattaac

SEQ ID NO: 19698 - DNA, 122 bp, Homo sapiens
  misc_feature (61)..(62): /note="This region represents a CpG dinucleotide"
  misc_feature (61)..(61): /note="Nucleotide may be methylated to form 5-methylcytosine"
gaaaacagtaaatgggaattctttggtagtgcagagtctgagtctgttccctctgcccagcgtctctgtttagaacatactgcaggagtgtccactgtaccaagaagggtagaaagggtcaa

SEQ ID NO: 19699 - DNA, 122 bp, Homo sapiens
  misc_feature (61)..(62): /note="This region represents a CpG dinucleotide"
  misc_feature (61)..(61): /note="Nucleotide may be methylated to form 5-methylcytosine"
ctggataatatccagcacttggctaatagccaatggggatcagggaattgcctgattgtacgtaggttgacacatttgcttataggttagcagctcacttgtgtaatgactttcattaaggt

SEQ ID NO: 19700 - DNA, 122 bp, Homo sapiens
  misc_feature (61)..(62): /note="This region represents a CpG dinucleotide"
  misc_feature (61)..(61): /note="Nucleotide may be methylated to form 5-methylcytosine"
taatgcaactctgcctcttgtccctatcatcttcagcaactagtcaacatttaagccttgcgcatcaacaataatctcataatctctctcccacacacgcacacctccatgcttcctcctct

SEQ ID NO: 19701 - DNA, 122 bp, Homo sapiens
  misc_feature (61)..(62): /note="This region represents a CpG dinucleotide"
  misc_feature (61)..(61): /note="Nucleotide may be methylated to form 5-methylcytosine"
cactgggtcgggtttaaaattcagtttctgatatagaggaatcctgggagagcgttgctgcgggggatcaatctaatgcgtgtgctctaatagatcctactgtagctagttccacaccgagg

SEQ ID NO: 19702 - DNA, 122 bp, Homo sapiens
  misc_feature (61)..(62): /note="This region represents a CpG dinucleotide"
  misc_feature (61)..(61): /note="Nucleotide may be methylated to form 5-methylcytosine"
ttttttctctactccaatatttataacagattacctttgccagttctctaaccacacttccgtaagatctttaataccataagatataattatcttcatctgaaaacctaactagttagtgc

SEQ ID NO: 19703 - DNA, 122 bp, Homo sapiens
  misc_feature (61)..(62): /note="This region represents a CpG dinucleotide"
  misc_feature (61)..(61): /note="Nucleotide may be methylated to form 5-methylcytosine"
taaagttctagtaactggtgtttacagagacagagacagagatagagagatcccaaaacacgaaagaaaacaagtcaccatgagaaggatcaatagaaccaataaattgcaaaaccagacca

SEQ ID NO: 19704 - DNA, 122 bp, Homo sapiens
  misc_feature (61)..(62): /note="This region represents a CpG dinucleotide"
  misc_feature (61)..(61): /note="Nucleotide may be methylated to form 5-methylcytosine"
gcccttggatccatccatccttaagattcccagttatgttagccaactaaacttcactttcgcttaatctagtttaagttggtttatgccaaatataaccaagagttctggctcaaccactt

SEQ ID NO: 19705 - DNA, 122 bp, Homo sapiens
  misc_feature (61)..(62): /note="This region represents a CpG dinucleotide"
  misc_feature (61)..(61): /note="Nucleotide may be methylated to form 5-methylcytosine"
caaatatttattgagccctatttcccaggcaccacgataagggctggatacatgtcaacacgccacagggggtggattgtgttaaaacctcctcctagacctacctttgcctaaaatctcct

SEQ ID NO: 19706 - DNA, 122 bp, Homo sapiens
  misc_feature (61)..(62): /note="This region represents a CpG dinucleotide"
  misc_feature (61)..(61): /note="Nucleotide may be methylated to form 5-methylcytosine"
gattcatctgagagatgaaaggaacggaatgccacaggacaaccctaggggaggagtgcacgacactaggggcttcggaggcacgaggatgcgacatgaacaagcccactcgccgtcagagt

SEQ ID NO: 19707 - DNA, 122 bp, Homo sapiens
  misc_feature (61)..(62): /note="This region represents a CpG dinucleotide"
  misc_feature (61)..(61): /note="Nucleotide may be methylated to form 5-methylcytosine"
gccatgggtcatgcctgtgtaatcacagatcatgtgatcctgccactgtactccagcctgcgtgacagagcaagaccctgtctccaaaaaaaaaaaaaaaaaaaaaaaaaaaggactgcgtg

SEQ ID NO: 19708 - DNA, 122 bp, Homo sapiens
  misc_feature (61)..(62): /note="This region represents a CpG dinucleotide"
  misc_feature (61)..(61): /note="Nucleotide may be methylated to form 5-methylcytosine"
gaatattttgggcttcacaggctgtattgtatgggctgtgtcatgactcctctactctgccgttatagcactaaagcagttgtcgacaatgcataaacaagagggtatggctgtgttccaat

SEQ ID NO: 19709 - DNA, 122 bp, Homo sapiens
  misc_feature (61)..(62): /note="This region represents a CpG dinucleotide"
  misc_feature (61)..(61): /note="Nucleotide may be methylated to form 5-methylcytosine"
cttcccctattcttgcccaggtcagctatgtcattggtaatacttggctgccttttctaccgctcccctttctaaatctcatgttacccatagtatacatgggccctttgtatgcctgccta

SEQ ID NO: 19710 - DNA, 122 bp, Homo sapiens
  misc_feature (61)..(62): /note="This region represents a CpG dinucleotide"
  misc_feature (61)..(61): /note="Nucleotide may be methylated to form 5-methylcytosine"
aacactccaggaagagccggccatggcaggcggggactgtgtggcaagcctggttctgggcgccggcggaccggggctccggcgcggacatggcaaggtggccatgagggggacagaatggg

SEQ ID NO: 19711 - DNA, 122 bp, Homo sapiens
  misc_feature (61)..(62): /note="This region represents a CpG dinucleotide"
  misc_feature (61)..(61): /note="Nucleotide may be methylated to form 5-methylcytosine"
tctcagctgcagatgtgtggcgtaatacattgtacgctcatctcagctgcagatgtgtggcgtaatacatcgtacgcacgtggaatgaatcattggttgttttacagtgctaacagtatact

SEQ ID NO: 19712 - DNA, 122 bp, Homo sapiens
  misc_feature (61)..(62): /note="This region represents a CpG dinucleotide"
  misc_feature (61)..(61): /note="Nucleotide may be methylated to form 5-methylcytosine"
ctcaagtgatccacctgccttggcctcccaagttgctgggattacaggcttgagccaccacgccagccaaacaggatatttaaattaaagccaaaatggccggcgcggtggctcacgcctgt

SEQ ID NO: 19713 - DNA, 122 bp, Homo sapiens
  misc_feature (61)..(62): /note="This region represents a CpG dinucleotide"
  misc_feature (61)..(61): /note="Nucleotide may be methylated to form 5-methylcytosine"
aactcattgcttcaaattgtcgccaagcccattaggctacctgaactgtctcagaaagtgcgggtggctgcgtcgaacggtggtggctcagaggaagagattggggccggcagcgacctagg

SEQ ID NO: 19714 - DNA, 122 bp, Homo sapiens
  misc_feature (61)..(62): /note="This region represents a CpG dinucleotide"
  misc_feature (61)..(61): /note="Nucleotide may be methylated to form 5-methylcytosine"
acacaggagcaagccctgactctttggtcatgacgctcagagatgtgaacatgtgtttcccgctacgtgaagaagccagtgtgaggaaacaaggctgggaagaacccagccgagaggaggag

SEQ ID NO: 19715 - DNA, 122 bp, Homo sapiens
  misc_feature (61)..(62): /note="This region represents a CpG dinucleotide"
  misc_feature (61)..(61): /note="Nucleotide may be methylated to form 5-methylcytosine"
aagacagaattatttagacaaatggctttcagaagttccgtcacagatataccccatgttcgtttacagtgagtttcacccaacatttgagtctatttactgagaaatggttgggaaggagc

SEQ ID NO: 19716 - DNA, 122 bp, Homo sapiens
  misc_feature (61)..(62): /note="This region represents a CpG dinucleotide"
  misc_feature (61)..(61): /note="Nucleotide may be methylated to form 5-methylcytosine"
agccactggccccaataactaactcaagacagcaacacgttatgcatggtgagttcagaccgcagctgtctatgtagccagttaagtagcatcatcaagacgatccagtgcagagcagtggc

SEQ ID NO: 19717 - DNA, 122 bp, Homo sapiens
  misc_feature (61)..(62): /note="This region represents a CpG dinucleotide"
  misc_feature (61)..(61): /note="Nucleotide may be methylated to form 5-methylcytosine"
tatacaacagagacattttacctgccatgaagagtcattacaggaacttgccttgcaacacgtctagaatagtccttaacacacaataaatgagcactaagtgctactattttccttccact

SEQ ID NO: 19718 - DNA, 122 bp, Homo sapiens
  misc_feature (61)..(62): /note="This region represents a CpG dinucleotide"
  misc_feature (61)..(61): /note="Nucleotide may be methylated to form 5-methylcytosine"
gcttcgtaatcctggcttcctgctttctgggtcaaagccctggtggtgtgttcttgatatcggtccatctagtggcgttgtttgattcctcccaccttgctgatcattcgtagtgtagcccc

SEQ ID NO: 19719 - DNA, 122 bp, Homo sapiens
  misc_feature (61)..(62): /note="This region represents a CpG dinucleotide"
  misc_feature (61)..(61): /note="Nucleotide may be methylated to form 5-methylcytosine"
aaagaaggcacggcttctgctcttaagccaagtggtcttttcaaaggccttctttaaaatcgctcagatgggtgcttttgagtctgcgggtctggtttctgaaaacccaggctgcacgcagc

SEQ ID NO: 19720 - DNA, 122 bp, Homo sapiens
  misc_feature (61)..(62): /note="This region represents a CpG dinucleotide"
  misc_feature (61)..(61): /note="Nucleotide may be methylated to form 5-methylcytosine"
ataaatgcttaccatcaagcaagcaaacaaatgaatacatgtagtagactatatatgaaacgagaggtagtgagaaattgaagtaaagacaaagatatgacactaagaatcacaaaagaatc

SEQ ID NO: 19721 - DNA, 122 bp, Homo sapiens
  misc_feature (61)..(62): /note="This region represents a CpG dinucleotide"
  misc_feature (61)..(61): /note="Nucleotide may be methylated to form 5-methylcytosine"
gcgctgtgggaatcctgcttgggtaaatgtcaccgctttatataaagaactttgctctatcgtagctccagaatctgctcagattgccacaccttaacatatgatctgattattaggaagta

SEQ ID NO: 19722 - DNA, 122 bp, Homo sapiens
  misc_feature (61)..(62): /note="This region represents a CpG dinucleotide"
  misc_feature (61)..(61): /note="Nucleotide may be methylated to form 5-methylcytosine"
agaaaggaatgccacaaccatgacacaattttttcaaacaaaattctttacctcatttctcgttcttcatgttgagcgataaggttgctataaaaattctccagtgtcactttggtcattgt

SEQ ID NO: 19723 - DNA, 122 bp, Homo sapiens
  misc_feature (61)..(62): /note="This region represents a CpG dinucleotide"
  misc_feature (61)..(61): /note="Nucleotide may be methylated to form 5-methylcytosine"
caggtggttcccagagccaggaaggaaccacgtaccacagacagaatttcgcaggtgcgacggccgtcctccagccacacccgcctccgagctgtgctgcccgcttcctccagggcctcaag

SEQ ID NO: 19724 - DNA, 122 bp, Homo sapiens
  misc_feature (61)..(62): /note="This region represents a CpG dinucleotide"
  misc_feature (61)..(61): /note="Nucleotide may be methylated to form 5-methylcytosine"
gtaccatgggcatgtgagaggctgtccctgttcttgggaaatgttcactaaaacatcttacggataaacgagcatgatgtatacaaataatcctcaaatggttcatggttcagagaggatag

SEQ ID NO: 19725 - DNA, 122 bp, Homo sapiens
  misc_feature (61)..(62): /note="This region represents a CpG dinucleotide"
  misc_feature (61)..(61): /note="Nucleotide may be methylated to form 5-methylcytosine"
tcatagatcctatcaaggagctcagtagcaaagttatacataaacagcttacttcctttgcggacacactcatggttttggaacttgcacctcctacccaaagattgatgatgtggaagaag

SEQ ID NO: 19726 - DNA, 122 bp, Homo sapiens
  misc_feature (61)..(62): /note="This region represents a CpG dinucleotide"
  misc_feature (61)..(61): /note="Nucleotide may be methylated to form 5-methylcytosine"
tctgattcctgcaaaaagttcagcaggcagagttaatttctagtatctttcgtgttcaaacgccagacaaacagaatgactctagatgttcaggttgcatgtttgtcatagcactttaagta

SEQ ID NO: 19727 - DNA, 122 bp, Homo sapiens
  misc_feature (61)..(62): /note="This region represents a CpG dinucleotide"
  misc_feature (61)..(61): /note="Nucleotide may be methylated to form 5-methylcytosine"
cccctgtatgatgacacagaaacctgaatgtcagcagcttctgcctgacactgcccatggcgagctccactgctcttccagggagtcccgggcagctgccagcagggaaggccctggagttt

SEQ ID NO: 19728 - DNA, 122 bp, Homo sapiens
  misc_feature (61)..(62): /note="This region represents a CpG dinucleotide"
  misc_feature (61)..(61): /note="Nucleotide may be methylated to form 5-methylcytosine"
cggccggcacccctccctccgcacctgagcctgcctgtcaccagccggcacccctccctccgcaccttcacggtgtccaggttcttgccctggaagttcacatctgtctcgtggttcatggg

SEQ ID NO: 19729 - DNA, 122 bp, Homo sapiens
  misc_feature (61)..(62): /note="This region represents a CpG dinucleotide"
  misc_feature (61)..(61): /note="Nucleotide may be methylated to form 5-methylcytosine"
caggaattctgtggttaggcttctagggttcaagtctcagctctgcagtctctagctatacggccttctgtggtgcagtagttaagcagggcttacagaatgtcaagatgtaaggtaatctc

SEQ ID NO: 19730 - DNA, 122 bp, Homo sapiens
  misc_feature (61)..(62): /note="This region represents a CpG dinucleotide"
  misc_feature (61)..(61): /note="Nucleotide may be methylated to form 5-methylcytosine"
attaagtgcttaaaagctccatttgttcttaaaacaaatctcttcctctccaattgcagccgaagagaagacatagactgtgcggctgcaccaacaagctgagcagacagacaatagggcca

SEQ ID NO: 19731 - DNA, 122 bp, Homo sapiens
  misc_feature (61)..(62): /note="This region represents a CpG dinucleotide"
  misc_feature (61)..(61): /note="Nucleotide may be methylated to form 5-methylcytosine"
cgttaactacataatacttctcttcttgtcagttacctgtattttatctcacaggtgttccggcttataaaattgtttatttcagatcagattctcacctgtagtaactggcgttgatgtgg

SEQ ID NO: 19732 - DNA, 122 bp, Homo sapiens
  misc_feature (61)..(62): /note="This region represents a CpG dinucleotide"
  misc_feature (61)..(61): /note="Nucleotide may be methylated to form 5-methylcytosine"
ctagagccatagaggaagcaaatctgtagaaagagagaaaaatgaagcagaggagagacacgttttaataccattcgggggcttgtttccaatcccaggtcagctctgcttgttttctttga

SEQ ID NO: 19733 - DNA, 122 bp, Homo sapiens
  misc_feature (61)..(62): /note="This region represents a CpG dinucleotide"
  misc_feature (61)..(61): /note="Nucleotide may be methylated to form 5-methylcytosine"
tcaaattcctttgtgactcagagtaactgacattgttagtttagataaggcactataaaacggaaattagagcaagtagaggtcactttcaactttgacgcataaaaactgagcaaaattaa

SEQ ID NO: 19734 - DNA, 122 bp, Homo sapiens
  misc_feature (61)..(62): /note="This region represents a CpG dinucleotide"
  misc_feature (61)..(61): /note="Nucleotide may be methylated to form 5-methylcytosine"
gtggaagagctgtattatgctcaggaaaaacagcaagggatcccagggagttgctgtgggcgggagactgaagattgaagtaaagtaagcctgagggttaaggaaagatatgtggcaggaaa

SEQ ID NO: 19735 - DNA, 122 bp, Homo sapiens
  misc_feature (61)..(62): /note="This region represents a CpG dinucleotide"
  misc_feature (61)..(61): /note="Nucleotide may be methylated to form 5-methylcytosine"
atggcgataggtaaatgcctcctgtgaagttttccttcggcatgtctttctgaagtttagcgttttcattttaaaaatggcatactggttttgcagatcactcaatgaagtttccaacttag

SEQ ID NO: 19736 - DNA, 122 bp, Homo sapiens
  misc_feature (61)..(62): /note="This region represents a CpG dinucleotide"
  misc_feature (61)..(61): /note="Nucleotide may be methylated to form 5-methylcytosine"
cccttcacagtcagtcatgtgatcatgtactcttgagcactgtttggcaggcctgagggtcgtacccttatcttccactgcctgtgtcagtgccgagcactttctagcaggagcttaatcag

SEQ ID NO: 19737 - DNA, 122 bp, Homo sapiens
  misc_feature (61)..(62): /note="This region represents a CpG dinucleotide"
  misc_feature (61)..(61): /note="Nucleotide may be methylated to form 5-methylcytosine"
acaattgatgactcattattccttaatcacaaactatgtttcacttaacttacttatgcacgttcctttgcaaacattgcaaatattacaaaaatgttattatattctctgtccaataatct

SEQ ID NO: 19738 - DNA, 122 bp, Homo sapiens
  misc_feature (61)..(62): /note="This region represents a CpG dinucleotide"
  misc_feature (61)..(61): /note="Nucleotide may be methylated to form 5-methylcytosine"
gttaattttgttgaaggcagagttctacagaagcataagcaggtgataactgagtaaatccgggaagactctgatgaggaggtgaattaggcttttgaagagtaaacaagttttcactgagt

SEQ ID NO: 19739 - DNA, 122 bp, Homo sapiens
  misc_feature (61)..(62): /note="This region represents a CpG dinucleotide"
  misc_feature (61)..(61): /note="Nucleotide may be methylated to form 5-methylcytosine"
ttcaggggacctgcctgtgaattctttgttccaaacccagggagccccctgtctccattgcgccctggcccacctccaggccgttctgccagcccaagctgctgctcacagaccagcatcgc

SEQ ID NO: 19740 - DNA, 122 bp, Homo sapiens
  misc_feature (61)..(62): /note="This region represents a CpG dinucleotide"
  misc_feature (61)..(61): /note="Nucleotide may be methylated to form 5-methylcytosine"
ttgtttttcttagaacctttgacctggaagtgatcccaagtgccatttggcttctgcttccgggtctgggaaggctacaatgataccattctacagtgttcattggttttcctgtcaatcta

SEQ ID NO: 19741 - DNA, 122 bp, Homo sapiens
  misc_feature (61)..(62): /note="This region represents a CpG dinucleotide"
  misc_feature (61)..(61): /note="Nucleotide may be methylated to form 5-methylcytosine"
agtgtccagttagattgttgcctatgcaactgtctctgaatgagtacttttcctggctgccgagccacacacttgactcatcagccttcttagcgattctgtgagccacgtgatagtcattc

SEQ ID NO: 19742 - DNA, 122 bp, Homo sapiens
  misc_feature (61)..(62): /note="This region represents a CpG dinucleotide"
  misc_feature (61)..(61): /note="Nucleotide may be methylated to form 5-methylcytosine"
cccctcccatcaaggagctccttatttttgcctcctcttgttgtacttactgtggagggccgtggaagcctttgaggaccagaagtcttgaggcgataggttctactcgtgaatcctttgaa

SEQ ID NO: 19743 - DNA, 122 bp, Homo sapiens
  misc_feature (61)..(62): /note="This region represents a CpG dinucleotide"
  misc_feature (61)..(61): /note="Nucleotide may be methylated to form 5-methylcytosine"
agcattgggctgagagtcacccagtctgggctccaaggaatgctgagctcagtagcggagcgtaacaacttagcattgttagaaatgtcctgtttcttactgtcatctctcagaggactctg

SEQ ID NO: 19744 - DNA, 122 bp, Homo sapiens
  misc_feature (61)..(62): /note="This region represents a CpG dinucleotide"
  misc_feature (61)..(61): /note="Nucleotide may be methylated to form 5-methylcytosine"
aattattactcatctctgaatgtgatgagttcttcctgaaccatctatttatacaagattcgtgcaccagagtgtccaaaagagtaatctagttcttagaaaacaggcttgtgagtgagagt

SEQ ID NO: 19745 - DNA, 122 bp, Homo sapiens
  misc_feature (61)..(62): /note="This region represents a CpG dinucleotide"
  misc_feature (61)..(61): /note="Nucleotide may be methylated to form 5-methylcytosine"
tgaagcaggaaacttgcaagatagtacttgctttaatgacaacagcctacagtaaatacgcgagatgccagaacatttttttggcacaataagaagaaaaggaccagaaggctcagaggtgt

SEQ ID NO: 19746 - DNA, 122 bp, Homo sapiens
  misc_feature (61)..(62): /note="This region represents a CpG dinucleotide"
  misc_feature (61)..(61): /note="Nucleotide may be methylated to form 5-methylcytosine"
agcttctgtgaaaaccctgtgaggcaggtaaggtgagtcccaggaggttttcccagatggcgcagctaattagtgttgctggtagcattaggagtagactgcagactcctggggccccagcc

SEQ ID NO: 19747 - DNA, 122 bp, Homo sapiens
  misc_feature (61)..(62): /note="This region represents a CpG dinucleotide"
  misc_feature (61)..(61): /note="Nucleotide may be methylated to form 5-methylcytosine"
tcacactgccttccattcatttgcacaaaccccaaaaccagaagttatatttgggaacaccgtaatgcttatcccaagtcaaatccattgcaaagtcctgtttaccatacctcttaaatggc

SEQ ID NO: 19748 - DNA, 122 bp, Homo sapiens
  misc_feature (61)..(62): /note="This region represents a CpG dinucleotide"
  misc_feature (61)..(61): /note="Nucleotide may be methylated to form 5-methylcytosine"
aattattgtcttcagggagttctctagaggctgcgggcgtgcactgctcaaatccacttgcgtgagaagctcatgaggagggtagttagctgacagtttccagctgcggcccctctggctct

SEQ ID NO: 19749 - DNA, 122 bp, Homo sapiens
  misc_feature (61)..(62): /note="This region represents a CpG dinucleotide"
  misc_feature (61)..(61): /note="Nucleotide may be methylated to form 5-methylcytosine"
tgtactgccccatgaaaacaactgatatcatctctatgtaaaggtgcagtggctcatgcccgtagtcccagctactcagggggctaaggcaggaggactgcttgaacctgggaggtggaggt

SEQ ID NO: 19750 - DNA, 122 bp, Homo sapiens
  misc_feature (61)..(62): /note="This region represents a CpG dinucleotide"
  misc_feature (61)..(61): /note="Nucleotide may be methylated to form 5-methylcytosine"
ccctccctccatgagtaagtcaccaaactgggacagaaggacagacagttggccggactccggccccatgactggctcataaaagccaccagcaattacagtgatgctgaggttgtgccggc

SEQ ID NO: 19751 - DNA, 122 bp, Homo sapiens
  misc_feature (61)..(62): /note="This region represents a CpG dinucleotide"
  misc_feature (61)..(61): /note="Nucleotide may be methylated to form 5-methylcytosine"
tttttctctcaagtgtaggaaaacttccataccccattccccagttccctatcaaatggtcgtgtaaaagttattcctaaaagctacagtgagctttcttggtcctaatttatttgtcacta

SEQ ID NO: 19752 - DNA, 122 bp, Homo sapiens
  misc_feature (61)..(62): /note="This region represents a CpG dinucleotide"
  misc_feature (61)..(61): /note="Nucleotide may be methylated to form 5-methylcytosine"
ttggaggacaaagagacggccagatcggagtgtgtgtggcagaggggcgatgccacccttcggagcgatgggtgccagggtactcggtgagagcccaggtcccgggtgagggggtgggctga

SEQ ID NO: 19753 - DNA, 122 bp, Homo sapiens
  misc_feature (61)..(62): /note="This region represents a CpG dinucleotide"
  misc_feature (61)..(61): /note="Nucleotide may be methylated to form 5-methylcytosine"
acatgtcccttttgtagtgaggcacatatttcaggcattgtcctatcagtgagtcagctgcggacatcacagggctcctggcttatgatctgtgatgctagattttgcaattgattgcaaaa

SEQ ID NO: 19754 - DNA, 122 bp, Homo sapiens
  misc_feature (61)..(62): /note="This region represents a CpG dinucleotide"
  misc_feature (61)..(61): /note="Nucleotide may be methylated to form 5-methylcytosine"
gtaggtgctcaataaatgcaccttgaattcatgaggctaactctaccctcctgtgtgggacgggatgcagaaccaaatgacctgggtcctgaccctgccactcaaggttctgtggtctgtgg

SEQ ID NO: 19755 - DNA, 122 bp, Homo sapiens
  misc_feature (61)..(62): /note="This region represents a CpG dinucleotide"
  misc_feature (61)..(61): /note="Nucleotide may be methylated to form 5-methylcytosine"
aggaaggataaagtgtgcattctattgtaccacagcaataatttttttgaccgtagcatacgctggtaggttgacatttagttaaacgggaaatgcttaaagctcatcacagtccctaaatc

SEQ ID NO: 19756 - DNA, 122 bp, Homo sapiens
  misc_feature (61)..(62): /note="This region represents a CpG dinucleotide"
  misc_feature (61)..(61): /note="Nucleotide may be methylated to form 5-methylcytosine"
aatgactaagtataaaacctcctccagggttttgctgtctgcttttaagaacatgcaacccgaaagcagacaactatgtaagttagaacaggggatttatgagaggtgattaggcagtgcct

SEQ ID NO: 19757 - DNA, 122 bp, Homo sapiens
  misc_feature (61)..(62): /note="This region represents a CpG dinucleotide"
  misc_feature (61)..(61): /note="Nucleotide may be methylated to form 5-methylcytosine"
tagaaactctccccacccaacatacctggagtgcaggcgaggtccaggcaaacgggaaagcgacttcttgtacgaatagccatctcaagatgaagccaggctgtggaaaacttaaggccatc

SEQ ID NO: 19758 - DNA, 122 bp, Homo sapiens
  misc_feature (61)..(62): /note="This region represents a CpG dinucleotide"
  misc_feature (61)..(61): /note="Nucleotide may be methylated to form 5-methylcytosine"
caaaagtatctgtggctaaaaacattaagatcctgtggtctagcaaaaaatgtcattttacggatgagacaactgagactcagaattaagacacaagaggaatggcttactcatagtcattg

SEQ ID NO: 19759 - DNA, 122 bp, Homo sapiens
  misc_feature (61)..(62): /note="This region represents a CpG dinucleotide"
  misc_feature (61)..(61): /note="Nucleotide may be methylated to form 5-methylcytosine"
tctgatgagcttagatctcttcctgccctaatagtctatacttctatgacagcctttgaccgtcacttgctttaatccttctaagccctttgaaggcaaggccgaagagttggtcttcttaa

SEQ ID NO: 19760 - DNA, 122 bp, Homo sapiens
  misc_feature (61)..(62): /note="This region represents a CpG dinucleotide"
  misc_feature (61)..(61): /note="Nucleotide may be methylated to form 5-methylcytosine"
agtggacgtgagatttcccactggtgacgatgcagctgctgtcacgagggttgaagccaacggccaggactgagtcatttgtactctgaagggaagacactagattcagccaccccaagccc

SEQ ID NO: 19761 - DNA, 122 bp, Homo sapiens
  misc_feature (61)..(62): /note="This region represents a CpG dinucleotide"
  misc_feature (61)..(61): /note="Nucleotide may be methylated to form 5-methylcytosine"
cttctgtagtttcttccagttttgttcacatgtgtatgctttttatttactgacagttaccgtatatacatcacttggccctcagcctctttcactgttaggtcctataaatttttcatttc

SEQ ID NO: 19762 - DNA, 122 bp, Homo sapiens
  misc_feature (61)..(62): /note="This region represents a CpG dinucleotide"
  misc_feature (61)..(61): /note="Nucleotide may be methylated to form 5-methylcytosine"
gctgacatcaccatttcagcagctttgcacaggcatcactgggttggtgcttcatattttcgatgcttctgcagctagtattccagcaagaacttgctcaacaccttttcatgtacaacaca

SEQ ID NO: 19763 - DNA, 122 bp, Homo sapiens
  misc_feature (61)..(62): /note="This region represents a CpG dinucleotide"
  misc_feature (61)..(61): /note="Nucleotide may be methylated to form 5-methylcytosine"
aatgtgtgctccacgccggctcctgccgatgttaacatttttcaggcactgagcgggaatcgtctgtatctgagagattgggaagacctccgttgtgagcccggccctgcttgttggcttgt

SEQ ID NO: 19764 - DNA, 122 bp, Homo sapiens
  misc_feature (61)..(62): /note="This region represents a CpG dinucleotide"
  misc_feature (61)..(61): /note="Nucleotide may be methylated to form 5-methylcytosine"
ctcttgggctccttctacagggcttattcccaaacgctggagtgctgggtcaaagggctccggaggttttattggtctcaggaaattctgagaccgtgctgacttgtacgcttttagagagt

SEQ ID NO: 19765 - DNA, 122 bp, Homo sapiens
  misc_feature (61)..(62): /note="This region represents a CpG dinucleotide"
  misc_feature (61)..(61): /note="Nucleotide may be methylated to form 5-methylcytosine"
gctcagcaaggggtgctcaggttcaggatgttgtttgttgattcaggctcaaccaggctccgcaagaaaaccttatcaggagattttattttcatgaacaggtgccagtcttcccgccagcc

SEQ ID NO: 19766 - DNA, 122 bp, Homo sapiens
  misc_feature (61)..(62): /note="This region represents a CpG dinucleotide"
  misc_feature (61)..(61): /note="Nucleotide may be methylated to form 5-methylcytosine"
tttgatcgttaggaagaacactaatgtttattgagcgccgggctgggtacttcattctcacgttctttttcagccctcagagcattcttgtggtagggcaagtgagtggcagatgcattgag

SEQ ID NO: 19767 - DNA, 122 bp, Homo sapiens
  misc_feature (61)..(62): /note="This region represents a CpG dinucleotide"
  misc_feature (61)..(61): /note="Nucleotide may be methylated to form 5-methylcytosine"
ctgtgacttccacagaaacttgacagttttcaagttatttttttcctctgtgtttagatgcggttatagttgtgctgtcaggccttatctcttctgtcatctagccagctcccaactaggtt

SEQ ID NO: 19768 - DNA, 122 bp, Homo sapiens
  misc_feature (61)..(62): /note="This region represents a CpG dinucleotide"
  misc_feature (61)..(61): /note="Nucleotide may be methylated to form 5-methylcytosine"
gtcattctgaactccaaattcccatccaaatccttgtttgtctcctggaacccataatgtcgaggtccaggcacgggaagtgatcaggtggtttactgactagggatgcctcttccaaggaa

SEQ ID NO: 19769 - DNA, 122 bp, Homo sapiens
  misc_feature (61)..(62): /note="This region represents a CpG dinucleotide"
  misc_feature (61)..(61): /note="Nucleotide may be methylated to form 5-methylcytosine"
gggatggttagaaaaggtgcttatgtacttccactctttctcttatatccctgccactatcgtgggaacatacccaggctagcctactgggagaataagagaattacatgagagacagctga

SEQ ID NO: 19770 - DNA, 122 bp, Homo sapiens
  misc_feature (61)..(62): /note="This region represents a CpG dinucleotide"
  misc_feature (61)..(61): /note="Nucleotide may be methylated to form 5-methylcytosine"
ctcctgacttccactactcactgcatgaggattattctgtggaaaccagagtactaaggacgaggcgctggatgatttggtcaaagtcaaatgtgccaagtcagcatcgagcagctattttt

SEQ ID NO: 19771 - DNA, 122 bp, Homo sapiens
  misc_feature (61)..(62): /note="This region represents a CpG dinucleotide"
  misc_feature (61)..(61): /note="Nucleotide may be methylated to form 5-methylcytosine"
ctggcggagagcctcagaaccacctgtttcctctgctgcaccatgcttgagtgtggaagccgtgcccctgttctccacagcgtgtatggccattcggcacatgtgtagatttgctgaatgag

SEQ ID NO: 19772 - DNA, 122 bp, Homo sapiens
  misc_feature (61)..(62): /note="This region represents a CpG dinucleotide"
  misc_feature (61)..(61): /note="Nucleotide may be methylated to form 5-methylcytosine"
aaacattcctaagaacagagagcaacaacataaccttctgactcaagatagtctctgttccggtaatttgatgacaaatagtgttgctgatcagcagaatatagagtggaaagggcggcttt

SEQ ID NO: 19773 - DNA, 122 bp, Homo sapiens
  misc_feature (61)..(62): /note="This region represents a CpG dinucleotide"
  misc_feature (61)..(61): /note="Nucleotide may be methylated to form 5-methylcytosine"
gagacagatggtacatgttaatacttagcacagaccctagtgcatggcaagtgcccatagcgttaattatcattattgctcaagattatacagcagctgttggcagaggtacaacttacttc

SEQ ID NO: 19774 - DNA, 122 bp, Homo sapiens
  misc_feature (61)..(62): /note="This region represents a CpG dinucleotide"
  misc_feature (61)..(61): /note="Nucleotide may be methylated to form 5-methylcytosine"
tcttcccagctctctctgctcaatgtgctgagtgagatagtgcttctcagcctctttgaacgctttcttgtccctctgcctgcactttggttcccatcacgtcagccttgaaggtggagtgg

SEQ ID NO: 19775 - DNA, 122 bp, Homo sapiens
  misc_feature (61)..(62): /note="This region represents a CpG dinucleotide"
  misc_feature (61)..(61): /note="Nucleotide may be methylated to form 5-methylcytosine"
tcaacttcctcctgtggtttgtcaagtcttttatatcatgaccactccaattcatcaaagcgttcatgcttattttgtgcctcagtgtttcacaatgatttcactcactcctgttaggtgag

SEQ ID NO: 19776 - DNA, 122 bp, Homo sapiens
  misc_feature (61)..(62): /note="This region represents a CpG dinucleotide"
  misc_feature (61)..(61): /note="Nucleotide may be methylated to form 5-methylcytosine"
ccaagctttgcgttataacaagccagggaaggacctagggaggttcccttccctctggaacggaaatggaactttctctgagcttaggatttgtaaggcactgaaattaactacagctgggg

SEQ ID NO: 19777 - DNA, 122 bp, Homo sapiens
  misc_feature (61)..(62): /note="This region represents a CpG dinucleotide"
  misc_feature (61)..(61): /note="Nucleotide may be methylated to form 5-methylcytosine"
tagtgactgaggatatgaaacaagatgtcaacttggattcatctcatggtacagaatttccgctaatgggcagggctgaagacagagtcactaaacactccatgtttttatgtgcacaaagc

SEQ ID NO: 19778 - DNA, 122 bp, Homo sapiens
  misc_feature (61)..(62): /note="This region represents a CpG dinucleotide"
  misc_feature (61)..(61): /note="Nucleotide may be methylated to form 5-methylcytosine"
aaaaaatgtgattcactgcatgaacagaatcaaaagcaaaatccacatgatcatctcaatcgacacagaaaaagctttagataaaatccagtatcccttcatgacaaaaaccctcaccaaac

SEQ ID NO: 19779 - DNA, 122 bp, Homo sapiens
  misc_feature (61)..(62): /note="This region represents a CpG dinucleotide"
  misc_feature (61)..(61): /note="Nucleotide may be methylated to form 5-methylcytosine"
aaggagcctgaaattctattaacttaaggtggttctttgggacattagtcaccatcttctcggtttgctgagtttctgaaagaaacttgccttccttaccccaacaccttgtttctcaactt

SEQ ID NO: 19780 - DNA, 122 bp, Homo sapiens
  misc_feature (61)..(62): /note="This region represents a CpG dinucleotide"
  misc_feature (61)..(61): /note="Nucleotide may be methylated to form 5-methylcytosine"
ctcatcactcattccagaaactgagcaggttcttgattcattcagcttcttagcttctcacgttcggtcactctccaaatcccatttattcttcctcccagctcaatctctgttgaatctat

SEQ ID NO: 19781 - DNA, 122 bp, Homo sapiens
  misc_feature (61)..(62): /note="This region represents a CpG dinucleotide"
  misc_feature (61)..(61): /note="Nucleotide may be methylated to form 5-methylcytosine"
tagcttcttatcttccagaagtctgaatctatgccattcttcattcaatcatttgacaatcgttcctaaggacctactgggtcacagcactagtaatacaaagatgaccactcaaattaact

SEQ ID NO: 19782 - DNA, 122 bp, Homo sapiens
  misc_feature (61)..(62): /note="This region represents a CpG dinucleotide"
  misc_feature (61)..(61): /note="Nucleotide may be methylated to form 5-methylcytosine"
agacgcgtggctgtgggagccgagtggcacagggagggctccagactggggagccggtgtcgccacacaggcaggggactggagcccggggtcccagcttccagtccagccgacatttgtgg

SEQ ID NO: 19783 - DNA, 122 bp, Homo sapiens
  misc_feature (61)..(62): /note="This region represents a CpG dinucleotide"
  misc_feature (61)..(61): /note="Nucleotide may be methylated to form 5-methylcytosine"
ccaaaagtacttttcaagatttagatggcaaacagccatccccacccttgtctaggaagtcgtattcgcaggtcacaggaaggcgtcaggtcaggcttgaagcagccggggtgtgggcaggg

SEQ ID NO: 19784 - DNA, 122 bp, Homo sapiens
  misc_feature (61)..(62): /note="This region represents a CpG dinucleotide"
  misc_feature (61)..(61): /note="Nucleotide may be methylated to form 5-methylcytosine"
ccaaaacagttcccctcccacccatccaccctcctaccggggctgggtgacaaaaatgaacgccccagagatcttgccaagttctgggccacgctcagcccagggaacacgcaattccccgt

SEQ ID NO: 19785 - DNA, 122 bp, Homo sapiens
  misc_feature (61)..(62): /note="This region represents a CpG dinucleotide"
  misc_feature (61)..(61): /note="Nucleotide may be methylated to form 5-methylcytosine"
taagtataataagggttacttgaacacaagaactgcaatgctgggacagctgatctgatacgagtcagctgctaagtgactaatatgtggatgctgaacaaaaggatgattcacatcctagg

SEQ ID NO: 19786 - DNA, 122 bp, Homo sapiens
  misc_feature (61)..(62): /note="This region represents a CpG dinucleotide"
  misc_feature (61)..(61): /note="Nucleotide may be methylated to form 5-methylcytosine"
agcggctccaaggacagagtctccagatccaggacagctggtggccttcacattgttttgcgtctcccaggttctcttaattataaccaatttgccaccctcagcaattccttgttcccctc

SEQ ID NO: 19787 - DNA, 122 bp, Homo sapiens
  misc_feature (61)..(62): /note="This region represents a CpG dinucleotide"
  misc_feature (61)..(61): /note="Nucleotide may be methylated to form 5-methylcytosine"
atgatgacatccaattctaactctatgacctcttttggaactctgtagggcaagtttctgcgtgtctttgttgtttaaacaaaaacagaaagcaaatcggcatgattgctaaacaaagggat

SEQ ID NO: 19788 - DNA, 122 bp, Homo sapiens
  misc_feature (61)..(62): /note="This region represents a CpG dinucleotide"
  misc_feature (61)..(61): /note="Nucleotide may be methylated to form 5-methylcytosine"
gctgaagcaatgaggccctctggccattttgaaagcattgttgcctcacaaatgctgtgacgacattgataccaggctagctgagtcttaacacctcactccattctggaattacagcttcc

SEQ ID NO: 19789 - DNA, 122 bp, Homo sapiens
  misc_feature (61)..(62): /note="This region represents a CpG dinucleotide"
  misc_feature (61)..(61): /note="Nucleotide may be methylated to form 5-methylcytosine"
tttgaaacagatctttttagaaaggttgtttcataatttctgaccgaagtatttgttacacgtaaaataagtaagaacggactgaggccagaaagctgtggatgacagaagggattggtgca

SEQ ID NO: 19790 - DNA, 122 bp, Homo sapiens
  misc_feature (61)..(62): /note="This region represents a CpG dinucleotide"
  misc_feature (61)..(61): /note="Nucleotide may be methylated to form 5-methylcytosine"
ggctttggctagcatggcatccaatgcccccaaggccagttctgcccccacacaggcctacgtacagctagactcctgctgccttgagccacccactgtgccctgggccacctgtgaagctc

SEQ ID NO: 19791 - DNA, 122 bp, Homo sapiens
  misc_feature (61)..(62): /note="This region represents a CpG dinucleotide"
  misc_feature (61)..(61): /note="Nucleotide may be methylated to form 5-methylcytosine"
cagaccttggcggtgagtgttacagctcaagccggcacatctggagttgtttgttcctcccggtgggttcgtggtctcggtgacttcaggagtgaagctgcaaatcttcgctgtgagtgtta

SEQ ID NO: 19792 - DNA, 122 bp, Homo sapiens
  misc_feature (61)..(62): /note="This region represents a CpG dinucleotide"
  misc_feature (61)..(61): /note="Nucleotide may be methylated to form 5-methylcytosine"
agagtctccagcgagactcagtctaaaaaaaaatatatatattttgagacagtctccctccgtcatccagcctggagccaactgctgcgatcttggctcactgcaacctctgcctcccagat

SEQ ID NO: 19793 - DNA, 122 bp, Homo sapiens
  misc_feature (61)..(62): /note="This region represents a CpG dinucleotide"
  misc_feature (61)..(61): /note="Nucleotide may be methylated to form 5-methylcytosine"
gtaacatggtgagactccatctctacccaaaatacaaaaaataagctgggtgtggtggttcgcgcccgtagtcccagctactggggaggctgaggcaggattgcttgagccccagaaccaga

SEQ ID NO: 19794 - DNA, 122 bp, Homo sapiens
  misc_feature (61)..(62): /note="This region represents a CpG dinucleotide"
  misc_feature (61)..(61): /note="Nucleotide may be methylated to form 5-methylcytosine"
agaaaatgaaaccacggactggggagactaactgtattactctcactttgtatatgaggacgcagaaccacagagaggttaagacacctgcctaaggctgcacagacaggaggtggcacagc

SEQ ID NO: 19795 - DNA, 122 bp, Homo sapiens
  misc_feature (61)..(62): /note="This region represents a CpG dinucleotide"
  misc_feature (61)..(61): /note="Nucleotide may be methylated to form 5-methylcytosine"
tttcctcacacacagcactcagctgaagactccagtgatctctgagtgtatctctgtttgcggtttcttcctttccggtactctgcttgtgagttttagcctccttggcttcctccaatatt

SEQ ID NO: 19796 - DNA, 122 bp, Homo sapiens
  misc_feature (61)..(62): /note="This region represents a CpG dinucleotide"
  misc_feature (61)..(61): /note="Nucleotide may be methylated to form 5-methylcytosine"
agttgtgtacatgcaagctattatcactgttacagttcttcctctgacttaacctgagaccggtatgtggagctatcttcattaagatatccattaagaaatttagtgaatgagaaagattt

SEQ ID NO: 19797 - DNA, 122 bp, Homo sapiens
  misc_feature (61)..(62): /note="This region represents a CpG dinucleotide"
  misc_feature (61)..(61): /note="Nucleotide may be methylated to form 5-methylcytosine"
tggaagtagcagaagcctctgtgagccatccttcatgcagaactagtcaggagcagctcccgctcagccaagagagtgaagcatgcccatcgcccagctcagccaggtaagtactagggaaa

SEQ ID NO: 19798 - DNA, 122 bp, Homo sapiens
  misc_feature (61)..(62): /note="This region represents a CpG dinucleotide"
  misc_feature (61)..(61): /note="Nucleotide may be methylated to form 5-methylcytosine"
tcaggtcagctgtgcggacagcgctacctgccacaggccacaccagctgcagtgcggtgacgggtggtgttctatgcctgggatagtgtcaccctgccaaatgagagtgaaagtctccacat

SEQ ID NO: 19799 - DNA, 122 bp, Homo sapiens
  misc_feature (61)..(62): /note="This region represents a CpG dinucleotide"
  misc_feature (61)..(61): /note="Nucleotide may be methylated to form 5-methylcytosine"
atgggaggttacagaagaaaaccactgtctgtaaaccaggaagctggtcctcaccagtcacgggaggatctcagactcccaggctccagaattgcgagaaataaatgctacttagtctaggg

SEQ ID NO: 19800 - DNA, 122 bp, Homo sapiens
  misc_feature (61)..(62): /note="This region represents a CpG dinucleotide"
  misc_feature (61)..(61): /note="Nucleotide may be methylated to form 5-methylcytosine"
tggtgttagcttgcatcaccttgtgttgtgagctcaaataccctgttcccaaaccaatcccgtaggcttacgagtctccctacacccagagttaggaagatggtcactgggtgggggggatg

SEQ ID NO: 19801 - DNA, 122 bp, Homo sapiens
  misc_feature (61)..(62): /note="This region represents a CpG dinucleotide"
  misc_feature (61)..(61): /note="Nucleotide may be methylated to form 5-methylcytosine"
tttctagattattctgccaaggcctgttgtatgtgtgaaccaccaagctagatcatagaacgtcttcaatatttaagaaaatcagtaattggcaatagagagccaagtatagtttttgacca

SEQ ID NO: 19802 - DNA, 122 bp, Homo sapiens
  misc_feature (61)..(62): /note="This region represents a CpG dinucleotide"
  misc_feature (61)..(61): /note="Nucleotide may be methylated to form 5-methylcytosine"
acgtattgtcttttttttgttctaagatttcatgttacatttagtcatcatgtcaccttacgctcctcttggctgtgacagttactcaggctttcctggtttgacagttttaaggagccctg

SEQ ID NO: 19803 - DNA, 122 bp, Homo sapiens
  misc_feature (61)..(62): /note="This region represents a CpG dinucleotide"
  misc_feature (61)..(61): /note="Nucleotide may be methylated to form 5-methylcytosine"
aacaaacaaacaagcaaaaaaacctgactctgacaaatgatgcattgttcccagtcctttcgtctgatacctttttttgttgttcttttaaatctctctctgattctgctgaaacaacttga

SEQ ID NO: 19804 - DNA, 122 bp, Homo sapiens
  misc_feature (61)..(62): /note="This region represents a CpG dinucleotide"
  misc_feature (61)..(61): /note="Nucleotide may be methylated to form 5-methylcytosine"
agaaacctgtggttccagggagcctgcagccgaggggtggtgcaggtcaggcaagactaccgtgtccagttgggctggttgttcactccactagggtgactgggcaagcagtaagtgagctg

SEQ ID NO: 19805 - DNA, 122 bp, Homo sapiens
  misc_feature (61)..(62): /note="This region represents a CpG dinucleotide"
  misc_feature (61)..(61): /note="Nucleotide may be methylated to form 5-methylcytosine"
atgaagaataacttctctagacaccttcttccccattgtgtatgttggttttactcctgacgtcataaactctttagtgttagaaggaacataaaaactgtttagaaattaaggagcttgtt

SEQ ID NO: 19806 - DNA, 122 bp, Homo sapiens
  misc_feature (61)..(62): /note="This region represents a CpG dinucleotide"
  misc_feature (61)..(61): /note="Nucleotide may be methylated to form 5-methylcytosine"
tttacctcaaaagtgcatgaaatggaaatggaaatatcttgtgaagatgtagacaaatgacggtcattgcccagagcagtagttactgtcagaaaaagagataaggatttccagtctgacag

SEQ ID NO: 19807 - DNA, 122 bp, Homo sapiens
  misc_feature (61)..(62): /note="This region represents a CpG dinucleotide"
  misc_feature (61)..(61): /note="Nucleotide may be methylated to form 5-methylcytosine"
cccaggccccacctttagcccagggagaggccctgttcaccttgagagagggcacacccacggatccggtccagtcctacctggagaagtgtgctgcttgggggcaggatggcctcagctca

SEQ ID NO: 19808 - DNA, 122 bp, Homo sapiens
  misc_feature (61)..(62): /note="This region represents a CpG dinucleotide"
  misc_feature (61)..(61): /note="Nucleotide may be methylated to form 5-methylcytosine"
ggaaaaaaaaaagcgcagtatttccagcaccaaatagaatttttttttccctatcctcttcgcaccactcctgattcatatcatttataaacacactggcaattatttcttatttctttttc

SEQ ID NO: 19809 - DNA, 122 bp, Homo sapiens
  misc_feature (61)..(62): /note="This region represents a CpG dinucleotide"
  misc_feature (61)..(61): /note="Nucleotide may be methylated to form 5-methylcytosine"
ccctggctatacctaagaatagcttcttttcctattttttttcaagtcatgtagctaacacgtaggaaatggcagctgccttattttcccaagtttcttttttctgattcttctgcctagat

SEQ ID NO: 19810 - DNA, 122 bp, Homo sapiens
  misc_feature (61)..(62): /note="This region represents a CpG dinucleotide"
  misc_feature (61)..(61): /note="Nucleotide may be methylated to form 5-methylcytosine"
cttttacatatattggatcgtttagtccttagaacaacaccatgaagtgagatttatctccgcttttcagattttacattttgcagtttacagataaggaaactgaggctcacgtcaccagt

SEQ ID NO: 19811 - DNA, 122 bp, Homo sapiens
  misc_feature (61)..(62): /note="This region represents a CpG dinucleotide"
  misc_feature (61)..(61): /note="Nucleotide may be methylated to form 5-methylcytosine"
aagaagcagaagctgttaggacacaaaacacacctgaacagtctcactggtgtgagtaaacgcaatcacctgggagacgcaggcatcatcacacccaattgtgtaattatagccacacattg

SEQ ID NO: 19812 - DNA, 122 bp, Homo sapiens
  misc_feature (61)..(62): /note="This region represents a CpG dinucleotide"
  misc_feature (61)..(61): /note="Nucleotide may be methylated to form 5-methylcytosine"
aacttgcaatatctctgtggtatgcctgtataccaaagaagttcataataatttcagaaacgtcctgcttcagggctagtaaggcagatcccaagattactgaattccatacacatgcccag

SEQ ID NO: 19813 - DNA, 122 bp, Homo sapiens
  misc_feature (61)..(62): /note="This region represents a CpG dinucleotide"
  misc_feature (61)..(61): /note="Nucleotide may be methylated to form 5-methylcytosine"
aaccaagattcctgggtgtgggcgcaggagggtctgcggagtgtgtgagctgaggctcggcgggaggaactaagcttttctcctgcccccacgtgccaggcacacatgcgcccaaagttggg

SEQ ID NO: 19814 - DNA, 122 bp, Homo sapiens
  misc_feature (61)..(62): /note="This region represents a CpG dinucleotide"
  misc_feature (61)..(61): /note="Nucleotide may be methylated to form 5-methylcytosine"
ctgctcttctgttacctctgactagactgttccgctgaatcactgaatggcttaatccctcgcttccttcaagtcttcattgaaaaggtgacacttgtgtaaagtcctccctgataaccaag

SEQ ID NO: 19815 - DNA, 122 bp, Homo sapiens
  misc_feature (61)..(62): /note="This region represents a CpG dinucleotide"
  misc_feature (61)..(61): /note="Nucleotide may be methylated to form 5-methylcytosine"
tttggattctgccacagagtaaccatgctacagggtgacctctgtgggctctggtttctgcgtcttgggagtgagtgggtggaactgtgtgattgctatgggagtgttgagtgctaatgttc

SEQ ID NO: 19816 - DNA, 122 bp, Homo sapiens
  misc_feature (61)..(62): /note="This region represents a CpG dinucleotide"
  misc_feature (61)..(61): /note="Nucleotide may be methylated to form 5-methylcytosine"
atcctggtgccaaggcaggccttccactgccacgtacacaccctgaaggcagagtcagcacgcccaaatcctgtggggcctgatggtgaccactcaagctcggacaaaccccaagtgtgatc

SEQ ID NO: 19817 - DNA, 122 bp, Homo sapiens
  misc_feature (61)..(62): /note="This region represents a CpG dinucleotide"
  misc_feature (61)..(61): /note="Nucleotide may be methylated to form 5-methylcytosine"
ttttttcagatgtgtcactgacaaagttttagaatattgtgcccttaaccaaattttccccgtgagacctgtggtttcattgtgcagttctgcttaatgtggtaatttttagaatgcgtatg

SEQ ID NO: 19818 - DNA, 122 bp, Homo sapiens
  misc_feature (61)..(62): /note="This region represents a CpG dinucleotide"
  misc_feature (61)..(61): /note="Nucleotide may be methylated to form 5-methylcytosine"
atgatgtgacgtcaccctgaagagccatgcacattgaggtttgccttcccttattgctgtcgggcaccctgaagccaccactgggtgaagaactctgagccagcctacaggaaaaggacaga

SEQ ID NO: 19819 - DNA, 122 bp, Homo sapiens
  misc_feature (61)..(62): /note="This region represents a CpG dinucleotide"
  misc_feature (61)..(61): /note="Nucleotide may be methylated to form 5-methylcytosine"
gaaaacctcggaggagaattggcctgaccttcattagtcatctggaccaacgatgattcacgtagctgaagagaaaggtgaggtccagagaggagcaggtgcctgccccaggtcacacagca

SEQ ID NO: 19820 - DNA, 122 bp, Homo sapiens
  misc_feature (61)..(62): /note="This region represents a CpG dinucleotide"
  misc_feature (61)..(61): /note="Nucleotide may be methylated to form 5-methylcytosine"
aggggctgaggtcaggggtggggggcaaaggccttatttctagcagttacactggctcaacggagttgcctctttgcaggcagcgagctgtcctgtcgctcaaatcgtctgattttatgaaa

SEQ ID NO: 19821 - DNA, 122 bp, Homo sapiens
  misc_feature (61)..(62): /note="This region represents a CpG dinucleotide"
  misc_feature (61)..(61): /note="Nucleotide may be methylated to form 5-methylcytosine"
tatagcttagaagggttagggacttgctagagctcactaatacgtggtgaaatcaggcttcggcactacccaatactgcctcaacaggggactttgtataagtgacccaatggcagttgggc

SEQ ID NO: 19822 - DNA, 122 bp, Homo sapiens
  misc_feature (61)..(62): /note="This region represents a CpG dinucleotide"
  misc_feature (61)..(61): /note="Nucleotide may be methylated to form 5-methylcytosine"
gatgcacctaaatcaccaggattgctataatcctttgatagttaggcagagtgttcgtctcggtctggcgttacagctgggctgtttacggagtgttacggtgtacttttcaagggagatag

SEQ ID NO: 19823 - DNA, 122 bp, Homo sapiens
  misc_feature (61)..(62): /note="This region represents a CpG dinucleotide"
  misc_feature (61)..(61): /note="Nucleotide may be methylated to form 5-methylcytosine"
gaatcatgaccctccacttctgtttccttgggcttctcagagtgatctcacccctgtggacggtctgcaaagatcattactcttgacctcacttctgcctcctaagctgagccgtgcagttg

SEQ ID NO: 19824 - DNA, 122 bp, Homo sapiens
  misc_feature (61)..(62): /note="This region represents a CpG dinucleotide"
  misc_feature (61)..(61): /note="Nucleotide may be methylated to form 5-methylcytosine"
gcatggaggaaacaggtctggttagtctgtctggacaggatcctcacatggggagaagagcggagatttcaaaggactagaaaacagagtacaaagtagaaaagtaagcagagggaaaaagg

SEQ ID NO: 19825 - DNA, 122 bp, Homo sapiens
  misc_feature (61)..(62): /note="This region represents a CpG dinucleotide"
  misc_feature (61)..(61): /note="Nucleotide may be methylated to form 5-methylcytosine"
tccctgtgtatatttccaagattttcctagtgataacatcactctaagtcacttgcttcacgcatgttttttgagtgaaggaaaaagctttggaattaataaccactccttaggcgttgcac

SEQ ID NO: 19826 - DNA, 122 bp, Homo sapiens
  misc_feature (61)..(62): /note="This region represents a CpG dinucleotide"
  misc_feature (61)..(61): /note="Nucleotide may be methylated to form 5-methylcytosine"
gtttcctggagaacttccattctgtctctgctctttggggttaattgttgggatcgatgccgcagcaattatgtaatgtttactgcagccaccacagagcccaggcttaagtgttgctaaat

SEQ ID NO: 19827 - DNA, 122 bp, Homo sapiens
  misc_feature (61)..(62): /note="This region represents a CpG dinucleotide"
  misc_feature (61)..(61): /note="Nucleotide may be methylated to form 5-methylcytosine"
agggttttggtaggattaaatgagttaatacatgtaacacatttagaacaatgcatgacacgtaataagcatttagtaaaagctattattagtatacatgtgtgaaacaggaaaataatttt

SEQ ID NO: 19828 - DNA, 122 bp, Homo sapiens
  misc_feature (61)..(62): /note="This region represents a CpG dinucleotide"
  misc_feature (61)..(61): /note="Nucleotide may be methylated to form 5-methylcytosine"
tcctggactcattcagctaacatgtgaacaagctcaggtttgctgaaagatgagagaccacggggagagatggccttaataatcccagctgtccaggacaaggcaatcacaaactggtcagt

SEQ ID NO: 19829 - DNA, 122 bp, Homo sapiens
  misc_feature (61)..(62): /note="This region represents a CpG dinucleotide"
  misc_feature (61)..(61): /note="Nucleotide may be methylated to form 5-methylcytosine"
gaggcttctttgaagggtcttgcatccagttctgaccttggagcaagtgttaagtggcctcgaggaatgtcactgaggctccttttggaacagattcaggaagaaaacgctgtcttgaaaag

SEQ ID NO: 19830 - DNA, 122 bp, Homo sapiens
  misc_feature (61)..(62): /note="This region represents a CpG dinucleotide"
  misc_feature (61)..(61): /note="Nucleotide may be methylated to form 5-methylcytosine"
gtcacccaagctttgctgtgaatgacttaaagagctcccatgaacatatcagcacagtgacgggcattaggtagatgcccaacaaatacatgtgtagcctaagtctggatagattaatgtgt

SEQ ID NO: 19831 - DNA, 122 bp, Homo sapiens
  misc_feature (61)..(62): /note="This region represents a CpG dinucleotide"
  misc_feature (61)..(61): /note="Nucleotide may be methylated to form 5-methylcytosine"
ctgagggctgtgctgtgaggtgggtccgggagcagctcggtccggagagtggagcgcgatcgttccctctgcaggcctcaatcgaggggcaaggctgatgctccgggccagctggggtctct

SEQ ID NO: 19832 - DNA, 122 bp, Homo sapiens
  misc_feature (61)..(62): /note="This region represents a CpG dinucleotide"
  misc_feature (61)..(61): /note="Nucleotide may be methylated to form 5-methylcytosine"
attaaatagtgctagatactggaaaagtgacaacatttataactcatatattaccatgcacggggaaaacagtatacacattattaaatctaatataatccacttttttaatgagttaaaaa

SEQ ID NO: 19833 - DNA, 122 bp, Homo sapiens
  misc_feature (61)..(62): /note="This region represents a CpG dinucleotide"
  misc_feature (61)..(61): /note="Nucleotide may be methylated to form 5-methylcytosine"
tcatttctgtgcttctctggaccctttcctctgagatgggggaggtgaacctgagcctcacgtttgtttggattgtgaagccccaggggcttctgaacagactgttcttgattctaaggcag

SEQ ID NO: 19834 - DNA, 122 bp, Homo sapiens
  misc_feature (61)..(62): /note="This region represents a CpG dinucleotide"
  misc_feature (61)..(61): /note="Nucleotide may be methylated to form 5-methylcytosine"
gctgttcctattcggccatcttggctcctcccctcactttattattatgactatttaattcgtaaaatttactcaatttagaaactaagttaaaaccaaaatggcacacttgagttattccc

SEQ ID NO: 19835 - DNA, 122 bp, Homo sapiens
  misc_feature (61)..(62): /note="This region represents a CpG dinucleotide"
  misc_feature (61)..(61): /note="Nucleotide may be methylated to form 5-methylcytosine"
tcagctcctccctttagccttcctggtcatctctgtgatccacaaaatccattgcttcctcgtctatatatgcaatgtccttgctgcagctccagtatcacacttaacacctattcctttcc

SEQ ID NO: 19836 - DNA, 122 bp, Homo sapiens
  misc_feature (61)..(62): /note="This region represents a CpG dinucleotide"
  misc_feature (61)..(61): /note="Nucleotide may be methylated to form 5-methylcytosine"
aatttttaaaaattcaatataatgtttatagaatggtattacattgttatcagtcttagacgtagggttataatggagctgaaaaaattcctgttgcctaatgacttaacattgtagtgtaa

SEQ ID NO: 19837 - DNA, 122 bp, Homo sapiens
  misc_feature (61)..(62): /note="This region represents a CpG dinucleotide"
  misc_feature (61)..(61): /note="Nucleotide may be methylated to form 5-methylcytosine"
taagctacatcctaaaataacccagagtactatgaccctgtgcatcacattagactcatacgactcatactcttttcccttcccatccctcctgtaatctcaggactcagccaagctcactg

SEQ ID NO: 19838 - DNA, 122 bp, Homo sapiens
  misc_feature (61)..(62): /note="This region represents a CpG dinucleotide"
  misc_feature (61)..(61): /note="Nucleotide may be methylated to form 5-methylcytosine"
tcgtgattacaggcgtgagcccagccaacaatggatgtttttgactctaggtctcttgcacgcaacatctcaagctttccagcagtggtagtgttaccagtggtggaattcacacaaatctg

SEQ ID NO: 19839 - DNA, 122 bp, Homo sapiens
  misc_feature (61)..(62): /note="This region represents a CpG dinucleotide"
  misc_feature (61)..(61): /note="Nucleotide may be methylated to form 5-methylcytosine"
agacaatcctgacttgagatccactccctaggacattagacaaaatgacgaatggcttctcgttacttgggaaaatgtttgttatgcaccatacaaacatttttacagatgagatcgttagc

SEQ ID NO: 19840 - DNA, 122 bp, Homo sapiens
  misc_feature (61)..(62): /note="This region represents a CpG dinucleotide"
  misc_feature (61)..(61): /note="Nucleotide may be methylated to form 5-methylcytosine"
agtgtgcgttattttcctggctcagcccttcaccttctctcaaggtgaatttgtcctagacgccagtcagaccgtgatgagtcacatccctggaggggccacccccttaggcatatcagaaa

SEQ ID NO: 19841 - DNA, 122 bp, Homo sapiens
  misc_feature (61)..(62): /note="This region represents a CpG dinucleotide"
  misc_feature (61)..(61): /note="Nucleotide may be methylated to form 5-methylcytosine"
agggcagatctccctcacattgcctttgatctcctgatacccatcacactgtcagcttagcgtagcgtaactaaggcaggaagagacccattctaacatcttgcttgtagcagacacttagg

SEQ ID NO: 19842 - DNA, 122 bp, Homo sapiens
  misc_feature (61)..(62): /note="This region represents a CpG dinucleotide"
  misc_feature (61)..(61): /note="Nucleotide may be methylated to form 5-methylcytosine"
tggcaaagcaatattgccttttggtgtttaattagcaagtctgtcagcaaacaccctgagcgccctatgccctcccacctggctgtgcaacctgttgggaggatggggactgtgtacccact

SEQ ID NO: 19843 - DNA, 122 bp, Homo sapiens
  misc_feature (61)..(62): /note="This region represents a CpG dinucleotide"
  misc_feature (61)..(61): /note="Nucleotide may be methylated to form 5-methylcytosine"
actgtcttgaggggggaggaagccgaacaacaagaggaaagcagcgttcgctcctgatttcgcacaggaagtccacagcacctcctgccaaagcgagataagaaagctcccatgcactattc

SEQ ID NO: 19844 - DNA, 122 bp, Homo sapiens
  misc_feature (61)..(62): /note="This region represents a CpG dinucleotide"
  misc_feature (61)..(61): /note="Nucleotide may be methylated to form 5-methylcytosine"
ttgggcaggaggtagaagagacaagaatttattgtacactttgcctcctgctggctagaacgctaatgtagcccttgcagaggcaggctctggtttcagggacaggctgaggagaaagaagc

SEQ ID NO: 19845 - DNA, 122 bp, Homo sapiens
  misc_feature (61)..(62): /note="This region represents a CpG dinucleotide"
  misc_feature (61)..(61): /note="Nucleotide may be methylated to form 5-methylcytosine"
attactcaggacatcctggcaaacacctttcaagcaagtcaccacaagggcctgtatagacggtagtgatgatgagaggagccaactttagcaccaatgctatttagcagtagaagggtaga

SEQ ID NO: 19846 - DNA, 122 bp, Homo sapiens
  misc_feature (61)..(62): /note="This region represents a CpG dinucleotide"
  misc_feature (61)..(61): /note="Nucleotide may be methylated to form 5-methylcytosine"
ccccttacccacccccacgcacaaagatgtccacagcttaatccctggaacctgtcaatacgttttgttacatggcaaaaaggaattaagctagcagctggacttaaggtcactaaccaact

SEQ ID NO: 19847 - DNA, 122 bp, Homo sapiens
  misc_feature (61)..(62): /note="This region represents a CpG dinucleotide"
  misc_feature (61)..(61): /note="Nucleotide may be methylated to form 5-methylcytosine"
agtagagaatagtagtggatccccctggacttattacccagccttgacaatcaatcagctcgtgccagtcttgtttcatctttacccgttttcattctctgctccttgctgtaatattctga

SEQ ID NO: 19848 - DNA, 122 bp, Homo sapiens
  misc_feature (61)..(62): /note="This region represents a CpG dinucleotide"
  misc_feature (61)..(61): /note="Nucleotide may be methylated to form 5-methylcytosine"
ggagggaaggaaagtgtgtacagacacgcctagttgtctgactaaatggcctttcccaaacgccttctctcctgctgttttttctatagaaagagaaatatgaaatactttcccagccacca

SEQ ID NO: 19849 - DNA, 122 bp, Homo sapiens
  misc_feature (61)..(62): /note="This region represents a CpG dinucleotide"
  misc_feature (61)..(61): /note="Nucleotide may be methylated to form 5-methylcytosine"
ggggaaccacatgttccctggctctggtgaggagaagttaggagacttggacttgtgggacgattctaaggtggtgctactgtccagtgtcacaaaggatatccaggcaccgtgcaaagccc

SEQ ID NO: 19850 - DNA, 122 bp, Homo sapiens
  misc_feature (61)..(62): /note="This region represents a CpG dinucleotide"
  misc_feature (61)..(61): /note="Nucleotide may be methylated to form 5-methylcytosine"
gtaggctttttaccatgtatcactgctattcctttttttttttttttgagaggaagaaggcgtgagttgacctggtattactcacccaaaagtgaggcattggggatatttatattcagcaa

SEQ ID NO: 19851 - DNA, 122 bp, Homo sapiens
  misc_feature (61)..(62): /note="This region represents a CpG dinucleotide"
  misc_feature (61)..(61): /note="Nucleotide may be methylated to form 5-methylcytosine"
gaatgtgatttcaccaagtgttgcaggcccaggcacgttcagggcagtgaggatggcacacgctcgggagggcctggcctgtttgccctgtatgtgtttatcaaatgcctgctctccacgag

SEQ ID NO: 19852 - DNA, 122 bp, Homo sapiens
  misc_feature (61)..(62): /note="This region represents a CpG dinucleotide"
  misc_feature (61)..(61): /note="Nucleotide may be methylated to form 5-methylcytosine"
aggtggagctcagagctgatcatgggagatttgcaagggcaggtcattgtggttagtcgacggacatttgagaacacatttcatgctgagtctgtgggtaaaaaaatacttccctatgagct

SEQ ID NO: 19853 - DNA, 122 bp, Homo sapiens
  misc_feature (61)..(62): /note="This region represents a CpG dinucleotide"
  misc_feature (61)..(61): /note="Nucleotide may be methylated to form 5-methylcytosine"
aagaggactcagctctgtgcagggcaccagtcttggtaagcaaggtgcaggctggatttgcgtccctgctcaccgccttggtccagggcccttgtgcagtgaacaacctgtccaaccacaca

SEQ ID NO: 19854 - DNA, 122 bp, Homo sapiens
  misc_feature (61)..(62): /note="This region represents a CpG dinucleotide"
  misc_feature (61)..(61): /note="Nucleotide may be methylated to form 5-methylcytosine"
tactgcatcagcacatcaacctattgattaattgttgagtctttttttaagtttaaacttcggccaggcagtgattgaaatggatttatttttgcaagtaagcagattacagaggcaagcaa

SEQ ID NO: 19855 - DNA, 122 bp, Homo sapiens
  misc_feature (61)..(62): /note="This region represents a CpG dinucleotide"
  misc_feature (61)..(61): /note="Nucleotide may be methylated to form 5-methylcytosine"
ctagaattgtttttttaaaatcactacctccgccctggatctaatagcaaagtaaacacacgtgtacttatataccagctaaatgttgtttgaagtgagaggctctttgattggggttagtg

SEQ ID NO: 19856 - DNA, 122 bp, Homo sapiens
  misc_feature (61)..(62): /note="This region represents a CpG dinucleotide"
  misc_feature (61)..(61): /note="Nucleotide may be methylated to form 5-methylcytosine"
cctgagtggcttccttgagtgcctgggggcctgcagctggcatagtctgggttggtgtgccgagccctatctgcccccagggcctgctcatggactgcacccactttcaaggccccactgaa

SEQ ID NO: 19857 - DNA, 122 bp, Homo sapiens
  misc_feature (61)..(62): /note="This region represents a CpG dinucleotide"
  misc_feature (61)..(61): /note="Nucleotide may be methylated to form 5-methylcytosine"
tttatctctcacatctctgttgactgggctcagctcactcaggatgtcttgcagttggaacggctagggctgaaatcatctgaaggttctactgagctggacatccaaggtcaccatcactc

SEQ ID NO: 19858 - DNA, 122 bp, Homo sapiens
  misc_feature (61)..(62): /note="This region represents a CpG dinucleotide"
  misc_feature (61)..(61): /note="Nucleotide may be methylated to form 5-methylcytosine"
tctccttgttggccagactgagaaccttcagcagcaagagctgctgttgctgtgggtcagcgatggaagtgatccggacgcggaccgagagcatggtggtggcgcgggagaagtttttgaaa

SEQ ID NO: 19859 - DNA, 122 bp, Homo sapiens
  misc_feature (61)..(62): /note="This region represents a CpG dinucleotide"
  misc_feature (61)..(61): /note="Nucleotide may be methylated to form 5-methylcytosine"
agggtggggcgtagggagcgccgtctccaccctcagtacttttggggtgggggacctgagcgtgcggagagcgggaggcagagctgagagcggggttaagcgcgaagctaaggcgccgcata

SEQ ID NO: 19860 - DNA, 122 bp, Homo sapiens
  misc_feature (61)..(62): /note="This region represents a CpG dinucleotide"
  misc_feature (61)..(61): /note="Nucleotide may be methylated to form 5-methylcytosine"
gggaatttatgtccaggtgagtttaaggaaaggaaggacttgggacccaggtcaaatagccgccacctggcaccattgaagtgctgtcaagttctgttggctgctactgcatcaggcaaatt

SEQ ID NO: 19861 - DNA, 122 bp, Homo sapiens
  misc_feature (61)..(62): /note="This region represents a CpG dinucleotide"
  misc_feature (61)..(61): /note="Nucleotide may be methylated to form 5-methylcytosine"
taaaatagtcaaactcacagaagcagacagtagaatagtgggtgccaggagctgggggaacgggaaatgggaagttgctgctcaaggagtataaatgttcagttaagcaagttgactaagtt

SEQ ID NO: 19862 - DNA, 122 bp, Homo sapiens
  misc_feature (61)..(62): /note="This region represents a CpG dinucleotide"
  misc_feature (61)..(61): /note="Nucleotide may be methylated to form 5-methylcytosine"
actgaaacagaggagggctggggctttgtttgggattggttggaatcagcatgacatcagcggatgactggtttttccagtgtgagacatttcataattcattatctaatggaaagcccttc

SEQ ID NO: 19863 - DNA, 122 bp, Homo sapiens
  misc_feature (61)..(62): /note="This region represents a CpG dinucleotide"
  misc_feature (61)..(61): /note="Nucleotide may be methylated to form 5-methylcytosine"
ccttttaaatgtacctgcttcttgaaaagattatttcttcagtcttttcccagagagtgtcgacacaggtgtgatgtaattaagagtcaggagagtaaggagagtaacttcgaggtctggag

SEQ ID NO: 19864 - DNA, 122 bp, Homo sapiens
  misc_feature (61)..(62): /note="This region represents a CpG dinucleotide"
  misc_feature (61)..(61): /note="Nucleotide may be methylated to form 5-methylcytosine"
atgaaagagtataactattgacatgctccattacaaactttgttgtgtcaccagttcttccgtatcttgatccaagatgacatcttgtctggccatggaggtggttaagactaaatgaaaat

SEQ ID NO: 19865 - DNA, 122 bp, Homo sapiens
  misc_feature (61)..(62): /note="This region represents a CpG dinucleotide"
  misc_feature (61)..(61): /note="Nucleotide may be methylated to form 5-methylcytosine"
ccactgtggggctctctgattccacagtgggcgagacccagaggccagtccctaataggacgtgttcaaatgtgggcccaggaaaacctccagaggcctgggggctccaggaggcttcaatg

SEQ ID NO: 19866 - DNA, 122 bp, Homo sapiens
  misc_feature (61)..(62): /note="This region represents a CpG dinucleotide"
  misc_feature (61)..(61): /note="Nucleotide may be methylated to form 5-methylcytosine"
tgaactaagacaacaccctttatgtcagttaaatttacaattaccttacgtacatatatacgtacatataaggtcccaccctgccccatcttggaaagctacttgttaaacatttaccagca

SEQ ID NO: 19867 - DNA, 122 bp, Homo sapiens
  misc_feature (61)..(62): /note="This region represents a CpG dinucleotide"
  misc_feature (61)..(61): /note="Nucleotide may be methylated to form 5-methylcytosine"
aattaatatgaaagttgagcaggtagtcaaagcaaggcttcagaagaaagtacagactggcgtaggagtaaggtgtttatctcttttggtgttttattctgtaatcttcaaaggctcttgga

SEQ ID NO: 19868 - DNA, 122 bp, Homo sapiens
  misc_feature (61)..(62): /note="This region represents a CpG dinucleotide"
  misc_feature (61)..(61): /note="Nucleotide may be methylated to form 5-methylcytosine"
tggcctcctggcctctcacccttctccagctccacagggaacagctccaacctctccacacgcttctccagctcgtactcagcagaggctgccatgggatccacatcctcgttgcgacgatc

SEQ ID NO: 19869 - DNA, 122 bp, Homo sapiens
  misc_feature (61)..(62): /note="This region represents a CpG dinucleotide"
  misc_feature (61)..(61): /note="Nucleotide may be methylated to form 5-methylcytosine"
atcttgttcgttactgttaactgccacattcagcccaatgcctagctctgaatatgcactcgtaagtattggctgaatgaattaatcattttgttattagtaataatgactctgccactctg

SEQ ID NO: 19870 - DNA, 122 bp, Homo sapiens
  misc_feature (61)..(62): /note="This region represents a CpG dinucleotide"
  misc_feature (61)..(61): /note="Nucleotide may be methylated to form 5-methylcytosine"
tcgattttttcttgtcagttcaggatagtcttggtcaagttacttaacctcttcatatctcgtatagtcttgtaatgtgaagaagcactaataagtttgattataaaacactgcaaatttta

SEQ ID NO: 19871 - DNA, 122 bp, Homo sapiens
  misc_feature (61)..(62): /note="This region represents a CpG dinucleotide"
  misc_feature (61)..(61): /note="Nucleotide may be methylated to form 5-methylcytosine"
agccaagggatgcaggaactgggtaacttcctgttacacccacagacgaagttatgtcaacgtagctttcctttacttttcagtctccagatcctgttctcttccagtttttccagaggctt

SEQ ID NO: 19872 - DNA, 122 bp, Homo sapiens
  misc_feature (61)..(62): /note="This region represents a CpG dinucleotide"
  misc_feature (61)..(61): /note="Nucleotide may be methylated to form 5-methylcytosine"
aaaggtcaatgagatttgagaatcatcatttctttttattttatatactttgcacttctacgtgtttttgctttaatttaaacacagctcaaacttgagcttctgtagtagtgggcccatca

SEQ ID NO: 19873 - DNA, 122 bp, Homo sapiens
  misc_feature (61)..(62): /note="This region represents a CpG dinucleotide"
  misc_feature (61)..(61): /note="Nucleotide may be methylated to form 5-methylcytosine"
tcactgtttctctacatacttcattttaatagatattagcactttatctccttcccgaatcgttgtaaaaaacctttacacagacccagcaagtttcagagtttacacacaaaacatcttac

SEQ ID NO: 19874 - DNA, 122 bp, Homo sapiens
  misc_feature (61)..(62): /note="This region represents a CpG dinucleotide"
  misc_feature (61)..(61): /note="Nucleotide may be methylated to form 5-methylcytosine"
acctggcctgcctcatctcatggttccagtgtctgtcagcagtgagttttgcagctggggcggggacagggggaaggcggacaggaggcgggtgcaggtggaaaggacatctgcctgggaac

SEQ ID NO: 19875 - DNA, 122 bp, Homo sapiens
  misc_feature (61)..(62): /note="This region represents a CpG dinucleotide"
  misc_feature (61)..(61): /note="Nucleotide may be methylated to form 5-methylcytosine"
ccctggtgtcacaaagcaggttgggcagggctgaaatccaaacccaggcctcatttcaggcgctgctgtttccatcatcccaagaacaagaccagctggccttctgcagtccctgccaggtc

SEQ ID NO: 19876 - DNA, 122 bp, Homo sapiens
  misc_feature (61)..(62): /note="This region represents a CpG dinucleotide"
  misc_feature (61)..(61): /note="Nucleotide may be methylated to form 5-methylcytosine"
gagactctgggctgctaagaaggcaaagcctgaggtctgtgcctgaccaggagatgctcacgtctctgagctgaaaacagtgactgaacaaatgactcattagagggatcaatgaacaaact

SEQ ID NO: 19877 - DNA, 122 bp, Homo sapiens
  misc_feature (61)..(62): /note="This region represents a CpG dinucleotide"
  misc_feature (61)..(61): /note="Nucleotide may be methylated to form 5-methylcytosine"
accaggggatggacaggtgtcctaggtatgcccaagaatgatgcaacatccccagccatgcgcatgatggctgaggaatctggggacagctattgtgtggaaagaaaatcttacaaagggaa

SEQ ID NO: 19878 - DNA, 122 bp, Homo sapiens
  misc_feature (61)..(62): /note="This region represents a CpG dinucleotide"
  misc_feature (61)..(61): /note="Nucleotide may be methylated to form 5-methylcytosine"
ttactcaacaaagctatgatcagttaggaacagccaaactgaatgggacttgccctgggccggaaggtcagtaaaccttagcagtttgtgtttctgagaatcaagaggctcttcgtcccgga

SEQ ID NO: 19879 - DNA, 122 bp, Homo sapiens
  misc_feature (61)..(62): /note="This region represents a CpG dinucleotide"
  misc_feature (61)..(61): /note="Nucleotide may be methylated to form 5-methylcytosine"
actgctcagggtgtactctcctgtgacgaatgagtcccgcttaatttggcagtgattatgcgggttgctggccctctaaacccctttgaacttgtaattgctgctggtttaaataatgaaca

SEQ ID NO: 19880 - DNA, 122 bp, Homo sapiens
  misc_feature (61)..(62): /note="This region represents a CpG dinucleotide"
  misc_feature (61)..(61): /note="Nucleotide may be methylated to form 5-methylcytosine"
ttctcttagaagcaaaattgattcaaagacccgtgctaacattcttaaatatctgccagccgtaataaagaaatcaatgtactttatgttcttagctcccacaatttagcctaaatatttgc

SEQ ID NO: 19881 - DNA, 122 bp, Homo sapiens
  misc_feature (61)..(62): /note="This region represents a CpG dinucleotide"
  misc_feature (61)..(61): /note="Nucleotide may be methylated to form 5-methylcytosine"
tgtgattcttcagttgcttcaggccatccggatacttacacgtgcaagcttgggctcagacgcctgacattgcccatggctggtttgaactcctgagatcaagcaatctaactgccttggcc

SEQ ID NO: 19882 - DNA, 122 bp, Homo sapiens
  misc_feature (61)..(62): /note="This region represents a CpG dinucleotide"
  misc_feature (61)..(61): /note="Nucleotide may be methylated to form 5-methylcytosine"
cacaagaatgcagtagacaaatgaactatttttgttttcttcctacaattctcaggaacccgtctccagctccatattaatcaatgtgagctttggagtcagacttattgcccaatagttgt

SEQ ID NO: 19883 - DNA, 122 bp, Homo sapiens
  misc_feature (61)..(62): /note="This region represents a CpG dinucleotide"
  misc_feature (61)..(61): /note="Nucleotide may be methylated to form 5-methylcytosine"
gctacggcagagggagctggctggtcagttaaagctcaggggagcctggcactgcaccgtcgctcccctgggcccttgccctgcacgttccttgacgtggggtgctcttctcaatagggtgg

SEQ ID NO: 19884 - DNA, 122 bp, Homo sapiens
  misc_feature (61)..(62): /note="This region represents a CpG dinucleotide"
  misc_feature (61)..(61): /note="Nucleotide may be methylated to form 5-methylcytosine"
tggctcacaccagtgagtccactctcaaagcccacccttgttcttcccactggaatcacacgaccattggtacaatgccatgggctgtaaaatgccattgcttcagcattaaaagagttaac

SEQ ID NO: 19885 - DNA, 122 bp, Homo sapiens
  misc_feature (61)..(62): /note="This region represents a CpG dinucleotide"
  misc_feature (61)..(61): /note="Nucleotide may be methylated to form 5-methylcytosine"
ttaatcactttctgaattttatcacaagatactcatttttgttgagtagttggaatttctcgtactaccatgaggaaactgagacttccaatccaagatgaggtcattggttgattgttgtc

SEQ ID NO: 19886 - DNA, 122 bp, Homo sapiens
  misc_feature (61)..(62): /note="This region represents a CpG dinucleotide"
  misc_feature (61)..(61): /note="Nucleotide may be methylated to form 5-methylcytosine"
agcttaacttatgctcttttttcaacagtacaaatgtggacagtgtttctttttgacaaacggaaacaacattcttgcaagatggcccagatggaaagggacttgtcttgcaagtgttctga

SEQ ID NO: 19887 - DNA, 122 bp, Homo sapiens
  misc_feature (61)..(62): /note="This region represents a CpG dinucleotide"
  misc_feature (61)..(61): /note="Nucleotide may be methylated to form 5-methylcytosine"
catatcttatgaggaatgcctaaggccacggagagtctatagcccagagaaaaggaaacacgattctttaattagaaaggaaaaaagatggtccttcagcctggtggtgcagtgccggctcg

SEQ ID NO: 19888 - DNA, 122 bp, Homo sapiens
  misc_feature (61)..(62): /note="This region represents a CpG dinucleotide"
  misc_feature (61)..(61): /note="Nucleotide may be methylated to form 5-methylcytosine"
gaccaatgtagtagtaaaaattggaaaagattttcaataaatattatgacaatgaatgcacgtgtgtttacgtgtatatgtacaagttaaagttaccaaagatgattataggtcagcaatga

SEQ ID NO: 19889 - DNA, 122 bp, Homo sapiens
  misc_feature (61)..(62): /note="This region represents a CpG dinucleotide"
  misc_feature (61)..(61): /note="Nucleotide may be methylated to form 5-methylcytosine"
tgggattcaaactcagctgtctcggactccaaagaccaaacttcactactgttttgttttcggtttggattcttccagggcttagcagttgctgagtacacagtagttaattgcctaagcaa

SEQ ID NO: 19890 - DNA, 122 bp, Homo sapiens
  misc_feature (61)..(62): /note="This region represents a CpG dinucleotide"
  misc_feature (61)..(61): /note="Nucleotide may be methylated to form 5-methylcytosine"
attatttatcctcccatccataagcctgtgtttccagttcaaggatttaggtcagcaagacgcagacccaaaaaccattcatttaataacccaagaaagaaggcaagcagggtggcccaaat

SEQ ID NO: 19891 - DNA, 122 bp, Homo sapiens
  misc_feature (61)..(62): /note="This region represents a CpG dinucleotide"
  misc_feature (61)..(61): /note="Nucleotide may be methylated to form 5-methylcytosine"
gtggccagataatgtggccaaatcccttacagcagccatcggacaaaggttgaagagaaacgaatggagacaaggcactgactcttattagatgtgtaggtgtctttaaagacacagttcac

SEQ ID NO: 19892 - DNA, 122 bp, Homo sapiens
  misc_feature (61)..(62): /note="This region represents a CpG dinucleotide"
  misc_feature (61)..(61): /note="Nucleotide may be methylated to form 5-methylcytosine"
tcaatctagcagcatcactcctttgcttaaaaccacttgcattactgtgggatgagcatacgttcagacagacaatggcttctcgtcccagctgttagtcatatgctcttggacaaattaca

SEQ ID NO: 19893 - DNA, 122 bp, Homo sapiens
  misc_feature (61)..(62): /note="This region represents a CpG dinucleotide"
  misc_feature (61)..(61): /note="Nucleotide may be methylated to form 5-methylcytosine"
gacatattgtacatgggaagctgtttattttttattactgaaaagtacagtatttggttgcgattgaagtcagccattctgtagctgtaaacagcctgaagctaggcagctgtattctttac

SEQ ID NO: 19894 - DNA, 122 bp, Homo sapiens
  misc_feature (61)..(62): /note="This region represents a CpG dinucleotide"
  misc_feature (61)..(61): /note="Nucleotide may be methylated to form 5-methylcytosine"
ttgtttctgttttcagctgtctcagtgattcagtccattccaatattcaatgagaccggacgattcagtttcacattgccatatccagtgaaaatcaaagttagattttccttttttcttca

SEQ ID NO: 19895 - DNA, 122 bp, Homo sapiens
  misc_feature (61)..(62): /note="This region represents a CpG dinucleotide"
  misc_feature (61)..(61): /note="Nucleotide may be methylated to form 5-methylcytosine"
ctttgtaaagcgggcgcaccacgctgtgcttgctattcacgcacttccaggagtctcccgcgaggctccacgtcctttcggggccgggggctcccagggcttgcctttcagggcagggagtg

SEQ ID NO: 19896 - DNA, 122 bp, Homo sapiens
  misc_feature (61)..(62): /note="This region represents a CpG dinucleotide"
  misc_feature (61)..(61): /note="Nucleotide may be methylated to form 5-methylcytosine"
ccccttggttcacctatttaacagattgaaactccaatcttcacagtgagaggaaggagacgggggaggaatctatctgcttctgtcttagtcaccttgggctgccatagcaaaataccata

SEQ ID NO: 19897 - DNA, 122 bp, Homo sapiens
  misc_feature (61)..(62): /note="This region represents a CpG dinucleotide"
  misc_feature (61)..(61): /note="Nucleotide may be methylated to form 5-methylcytosine"
gaaaagtatttaccccattgccttctcccctttgatatatttaggaaaacaagactgttacgtacatttgaatcaattgcatggtgtagcctttttgtgctggttgcggcttcactgtttac

SEQ ID NO: 19898 - DNA, 122 bp, Homo sapiens
  misc_feature (61)..(62): /note="This region represents a CpG dinucleotide"
  misc_feature (61)..(61): /note="Nucleotide may be methylated to form 5-methylcytosine"
ctgggggtctctcatgagggaccttctgaagtattttgctgggtgtctgctagctgggcacggctactgtgtgtctgctgagcttccaccgctgacccacttctatttccttcctcctgaga

SEQ ID NO: 19899 - DNA, 122 bp, Homo sapiens
  misc_feature (61)..(62): /note="This region represents a CpG dinucleotide"
  misc_feature (61)..(61): /note="Nucleotide may be methylated to form 5-methylcytosine"
gttcagccctgtgagcccccagttgcttcacatgtagtatgtgactcatggataaggccacgttcaccctgattcatctatgatgagctaacgcctagctggctcgtggttggaccttagaa

SEQ ID NO: 19900 - DNA, 122 bp, Homo sapiens
  misc_feature (61)..(62): /note="This region represents a CpG dinucleotide"
  misc_feature (61)..(61): /note="Nucleotide may be methylated to form 5-methylcytosine"
tggaatctggaatctgggactggcttgctgggtggcttcagctcagcctcatgaggttgccgtcaggccatgggctggagtcgctgtcttcccagggctgtagaatctgctttcagggtgac

SEQ ID NO: 19901 - DNA, 122 bp, Homo sapiens
  misc_feature (61)..(62): /note="This region represents a CpG dinucleotide"
  misc_feature (61)..(61): /note="Nucleotide may be methylated to form 5-methylcytosine"
aaacacatgctctgaagggaaccacgtaggaggcactcaataaatcgcagctgtcattgtcgttgtattgtccttgttattaacctgcctggaagtcagcagttgttcttcattgacttaac

SEQ ID NO: 19902 - DNA, 122 bp, Homo sapiens
  misc_feature (61)..(62): /note="This region represents a CpG dinucleotide"
  misc_feature (61)..(61): /note="Nucleotide may be methylated to form 5-methylcytosine"
cccctttgggctcaagtgagagtgacccatagagacaatactcagttttgctctcccattcgccatccagtgcagattatgcaatttgtcttcccacaccctcttcctcaacactgcttacc

SEQ ID NO: 19903 - DNA, 122 bp, Homo sapiens
  misc_feature (61)..(62): /note="This region represents a CpG dinucleotide"
  misc_feature (61)..(61): /note="Nucleotide may be methylated to form 5-methylcytosine"
tcctctaagcccctcctcattctgtagctcagtgtgggaatggatgttcacagtgattaacgctgcacagtgattaacgctgaatcatgaagaaaagctaagtgatgttcaagactctctgt

SEQ ID NO: 19904 - DNA, 122 bp, Homo sapiens
  misc_feature (61)..(62): /note="This region represents a CpG dinucleotide"
  misc_feature (61)..(61): /note="Nucleotide may be methylated to form 5-methylcytosine"
acatacctgcatgagaaaggttagtcagctgtgcctgacaaaatctccaagtctcttccccgccctctgccagaggagatgccctcttccgcatgccagccactcaccctccagagaggact

SEQ ID NO: 19905 - DNA, 122 bp, Homo sapiens
  misc_feature (61)..(62): /note="This region represents a CpG dinucleotide"
  misc_feature (61)..(61): /note="Nucleotide may be methylated to form 5-methylcytosine"
tatattctttgatacagcaattcctcatctatgactcaatgctcaggaaatgtacaagaacggatgactgcataatttgtaatagtaaaaacattggctgggcgcagtggctcacgcctgta

SEQ ID NO: 19906 - DNA, 122 bp, Homo sapiens
  misc_feature (61)..(62): /note="This region represents a CpG dinucleotide"
  misc_feature (61)..(61): /note="Nucleotide may be methylated to form 5-methylcytosine"
gccagcaataaaggactcctgaattagtctcagagtgtggcattctctctatgacttgctcggttacgacatttggaagccccagagagattcgccaccgggtgaagacctgactcattccg

SEQ ID NO: 19907 - DNA, 122 bp, Homo sapiens
  misc_feature (61)..(62): /note="This region represents a CpG dinucleotide"
  misc_feature (61)..(61): /note="Nucleotide may be methylated to form 5-methylcytosine"
taacttttataaatcagaagaaaaatccttgtttaacccatcaaaactatttgttcaaaacgaagcccctggtcacaatcatgtggactgaacagcagattcctggcctcatcatagaccca

SEQ ID NO: 19908 - DNA, 122 bp, Homo sapiens
  misc_feature (61)..(62): /note="This region represents a CpG dinucleotide"
  misc_feature (61)..(61): /note="Nucleotide may be methylated to form 5-methylcytosine"
ctttgtactttgtggcctgaattgcagctgctcagcctatgggaattacccgcattctgacgtttgccatgaataatgtacttagcatgaaatgagttcctcaatcttatcaggtatttggc

SEQ ID NO: 19909 - DNA, 122 bp, Homo sapiens
  misc_feature (61)..(62): /note="This region represents a CpG dinucleotide"
  misc_feature (61)..(61): /note="Nucleotide may be methylated to form 5-methylcytosine"
gcgatttcatcattgtgtgaacatcatcagagtgcacttaaacaaaactagatggtataacgtgttgcacacctaggctgtgtggtcatatgatatggcctgttgcttctagactacgaatc

SEQ ID NO: 19910 - DNA, 122 bp, Homo sapiens
  misc_feature (61)..(62): /note="This region represents a CpG dinucleotide"
  misc_feature (61)..(61): /note="Nucleotide may be methylated to form 5-methylcytosine"
gtgtcccctttattggcaaggggcctgatgctctctgccttctctcatgagtgtctttcacgctaacgtgtacaagattgccaaaagcatagggagtttccactttggacaatgagggtttg

SEQ ID NO: 19911 - DNA, 122 bp, Homo sapiens
  misc_feature (61)..(62): /note="This region represents a CpG dinucleotide"
  misc_feature (61)..(61): /note="Nucleotide may be methylated to form 5-methylcytosine"
gagctcagagtcactggaagctccgcctgtgagtgcattggtgactggcttcattcattccgcatcgtgtcatccactatgtggataaacgtgtaagtgctccatccctttttgtgggtgaa

SEQ ID NO: 19912 - DNA, 122 bp, Homo sapiens
  misc_feature (61)..(62): /note="This region represents a CpG dinucleotide"
  misc_feature (61)..(61): /note="Nucleotide may be methylated to form 5-methylcytosine"
ggatgttcttctttgctgtaaagtcactcactggatgagtattaaagaaagccttgtggccgggcgtggtggcttatgcctataatcccagcactttggaaggccaaggcgggtggatcact

SEQ ID NO: 19913 - DNA, 122 bp, Homo sapiens
  misc_feature (61)..(62): /note="This region represents a CpG dinucleotide"
  misc_feature (61)..(61): /note="Nucleotide may be methylated to form 5-methylcytosine"
gggtctgctctgcttaactgtgctgccgttagctgaggtttccagatcttatcactgatccgtacaacctgaaagagcctaactgactgagcaggggttagagttgaactggaaagagacca

SEQ ID NO: 19914 - DNA, 122 bp, Homo sapiens
  misc_feature (61)..(62): /note="This region represents a CpG dinucleotide"
  misc_feature (61)..(61): /note="Nucleotide may be methylated to form 5-methylcytosine"
ccccaaaggccccaggtctggctggctgggctgcaggataaccctgacaccaaaatggaacggaaaggtctggaagtcactgctctgtccacagccctggcaccactcctggggaggcttca

SEQ ID NO: 19915 - DNA, 122 bp, Homo sapiens
  misc_feature (61)..(62): /note="This region represents a CpG dinucleotide"
  misc_feature (61)..(61): /note="Nucleotide may be methylated to form 5-methylcytosine"
acatgagcatgagactaccaggaggtggggatcattgggagtcatcttggaagcgttaaccgtgcccagacaagtattaccaggagatttccaactctcttactctcactgttatatacaac

SEQ ID NO: 19916 - DNA, 122 bp, Homo sapiens
  misc_feature (61)..(62): /note="This region represents a CpG dinucleotide"
  misc_feature (61)..(61): /note="Nucleotide may be methylated to form 5-methylcytosine"
gttgcagaaaccacaaacccctgaaatagggggggtgagggagtataaaggcagcgtgggcgcccacagcacagccagtagaccctgtccacagtcctgacaggcatggaccttctcccttt

SEQ ID NO: 19917 - DNA, 122 bp, Homo sapiens
  misc_feature (61)..(62): /note="This region represents a CpG dinucleotide"
  misc_feature (61)..(61): /note="Nucleotide may be methylated to form 5-methylcytosine"
ccctggagctcaacagggacctaattaactgacagttggtctgattgccaagctgaggggcggggcggggaggggggcggtcagttgctgcttggctcacgtagcaaggagggcaacttttc

SEQ ID NO: 19918 - DNA, 122 bp, Homo sapiens
  misc_feature (61)..(62): /note="This region represents a CpG dinucleotide"
  misc_feature (61)..(61): /note="Nucleotide may be methylated to form 5-methylcytosine"
tgacaggtatgcccagcaagacctgaagaaaggcttgcacctgtacggcacgcagggcaacgtgggcctcaccaacgcctggagcatcatccagaccgacgtgaggcgtgggcaggtgggcg

SEQ ID NO: 19919 - DNA, 122 bp, Homo sapiens
  misc_feature (61)..(62): /note="This region represents a CpG dinucleotide"
  misc_feature (61)..(61): /note="Nucleotide may be methylated to form 5-methylcytosine"
atgccctgccttgataagggaaatgggtacctcccgaggaggaagtttatttgaggtctgcgtctgcagtcaagatggtgtgcctagacattgagacaaactaaataaagaggacattttgg

SEQ ID NO: 19920 - DNA, 122 bp, Homo sapiens
  misc_feature (61)..(62): /note="This region represents a CpG dinucleotide"
  misc_feature (61)..(61): /note="Nucleotide may be methylated to form 5-methylcytosine"
tgatcctacagacagaaatgtttccttggcagccttgagattcttgccctctctctgttacgtcagtggtggggaacctggggcagattcgcctccgtggcttctcctgcatgactgcgttg

SEQ ID NO: 19921 - DNA, 122 bp, Homo sapiens
  misc_feature (61)..(62): /note="This region represents a CpG dinucleotide"
  misc_feature (61)..(61): /note="Nucleotide may be methylated to form 5-methylcytosine"
cttccagggcactcaatatattcctcaagaatttctgcacatggagcagccagtactctccgcccaggaccttcatcatccttagtgtctttcagtgttcatgattcatttagatgatgcag

SEQ ID NO: 19922 - DNA, 122 bp, Homo sapiens
  misc_feature (61)..(62): /note="This region represents a CpG dinucleotide"
  misc_feature (61)..(61): /note="Nucleotide may be methylated to form 5-methylcytosine"
atgacacgatgagagctggctcctgttcaaggcggatccgcagtcttcaagacagaagtacgcttgatgtggcttcagaagtgaggggtgagtaacagcagcagacccaggcacaggccaca

SEQ ID NO: 19923 - DNA, 122 bp, Homo sapiens
  misc_feature (61)..(62): /note="This region represents a CpG dinucleotide"
  misc_feature (61)..(61): /note="Nucleotide may be methylated to form 5-methylcytosine"
caagtttcttcaggcaggaggaatagcacacacaaaggtaccacctgggaaggattcaagcgtgcacatagcaaaagggacccacttggtgggatggttttgtggggacattgttaaaaaaa

SEQ ID NO: 19924 - DNA, 122 bp, Homo sapiens
  misc_feature (61)..(62): /note="This region represents a CpG dinucleotide"
  misc_feature (61)..(61): /note="Nucleotide may be methylated to form 5-methylcytosine"
tcttttccattttgtagagcacctgtttttaaggggcctcccacaggagcatcacagcctcggccgttgctcctgtttctttagtgagctggctgcacattttgtgtcctattacgtcacat

SEQ ID NO: 19925 - DNA, 122 bp, Homo sapiens
  misc_feature (61)..(62): /note="This region represents a CpG dinucleotide"
  misc_feature (61)..(61): /note="Nucleotide may be methylated to form 5-methylcytosine"
catggcgtcatcactatcagtcaaactgtcaccagcggttcactgtgatgatacatctgacgtgcattgaaagaccaaggacctgctgcacttgactgtcatggcagcaatgatgatgacag

SEQ ID NO: 19926 - DNA, 122 bp, Homo sapiens
  misc_feature (61)..(62): /note="This region represents a CpG dinucleotide"
  misc_feature (61)..(61): /note="Nucleotide may be methylated to form 5-methylcytosine"
agtatatctaagagcttccctgagttcagtgggccactctagcaaattaatcatatccaacgagggcgttgtggaaaccccaatctagtcaatcagaagcacagggaaatccacctggagct

SEQ ID NO: 19927 - DNA, 122 bp, Homo sapiens
  misc_feature (61)..(62): /note="This region represents a CpG dinucleotide"
  misc_feature (61)..(61): /note="Nucleotide may be methylated to form 5-methylcytosine"
ccttctgtcctccctgtacaatgaaggagactgaccgtaagtggaaccaggaagtgttgacgtggtcattactgcaaggaaggaggaaaaatagcagccaaaaatgccatttacgtgaaact

SEQ ID NO: 19928 - DNA, 122 bp, Homo sapiens
  misc_feature (61)..(62): /note="This region represents a CpG dinucleotide"
  misc_feature (61)..(61): /note="Nucleotide may be methylated to form 5-methylcytosine"
tggggggtgggctccttttgcctaattgtccctagtctccctatggggacaggaggccttcgctctcctcagccgctgtctccgggtggctgtgaagatccaaagagataatccccggaggg

SEQ ID NO: 19929 - DNA, 122 bp, Homo sapiens
  misc_feature (61)..(62): /note="This region represents a CpG dinucleotide"
  misc_feature (61)..(61): /note="Nucleotide may be methylated to form 5-methylcytosine"
tgtagtcttttctgtctggcttccttctcttggcataatgttttcaagatgcacctgtgtcgtgccaggtgtcaggacctcattcttctttatggctgagtcatattccatcatatggatca

SEQ ID NO: 19930 - DNA, 122 bp, Homo sapiens
  misc_feature (61)..(62): /note="This region represents a CpG dinucleotide"
  misc_feature (61)..(61): /note="Nucleotide may be methylated to form 5-methylcytosine"
gcaccagtcttggtaaacctgaactgaccaccaaaccaagagaatgaccactgaccttgacggaacccttgatgctgcccaggaatctgctaggtgacctctgcataccccacgtgctcctc

SEQ ID NO: 19931 - DNA, 122 bp, Homo sapiens
  misc_feature (61)..(62): /note="This region represents a CpG dinucleotide"
  misc_feature (61)..(61): /note="Nucleotide may be methylated to form 5-methylcytosine"
ggctgtggttggtaggctagggctgtggtagggactcaagaagaaaactgtgggtgagaacgaatatttggaagttactgacttcagctgggactctcaatgaatcatgatcagtgtacaag

SEQ ID NO: 19932 - DNA, 122 bp, Homo sapiens
  misc_feature (61)..(62): /note="This region represents a CpG dinucleotide"
  misc_feature (61)..(61): /note="Nucleotide may be methylated to form 5-methylcytosine"
ctgggggagggggcagcataatcatagttacctgtatcagatgctcacctgtgctgagcacgccacatgccctggcccattcaggtgctctctgcaaacacccttaaggcaggtacagtatt

SEQ ID NO: 19933 - DNA, 122 bp, Homo sapiens
  misc_feature (61)..(62): /note="This region represents a CpG dinucleotide"
  misc_feature (61)..(61): /note="Nucleotide may be methylated to form 5-methylcytosine"
cttccttcaaaagtgattcaacgtgtggcctgagaagcggcagcatcagcctcacctgggcgttggtgagaacggcagcatcttggcctctcctgctgaatcagagcgcgctgcttaacacg

SEQ ID NO: 19934 - DNA, 122 bp, Homo sapiens
  misc_feature (61)..(62): /note="This region represents a CpG dinucleotide"
  misc_feature (61)..(61): /note="Nucleotide may be methylated to form 5-methylcytosine"
gttagttaaaaaaaaaaaaaaaaaaaaaaaaaggaagaagaaggcactgtgtaattgtgccggggatcttcagaaattgtaatgatgaaagagtgcaagctctcacttccccttcctgtaca

SEQ ID NO: 19935 - DNA, 122 bp, Homo sapiens
  misc_feature (61)..(62): /note="This region represents a CpG dinucleotide"
  misc_feature (61)..(61): /note="Nucleotide may be methylated to form 5-methylcytosine"
caaatggaccctcatgacataaatgaaacccaaaactcttttaagtgccagatttatttccgtgagatcaatttaaaccaaaaagatttcattctctcagaaaaattattcctgcttccttg

SEQ ID NO: 19936 - DNA, 122 bp, Homo sapiens
  misc_feature (61)..(62): /note="This region represents a CpG dinucleotide"
  misc_feature (61)..(61): /note="Nucleotide may be methylated to form 5-methylcytosine"
ggcatcatggttcttagttctcagcaggagaactccacactgtcttcaaacaaatacttacggggaaggttagaggttcactcaaaggtcatttctttggatactagtcagaatgtttacat

SEQ ID NO: 19937 - DNA, 122 bp, Homo sapiens
  misc_feature (61)..(62): /note="This region represents a CpG dinucleotide"
  misc_feature (61)..(61): /note="Nucleotide may be methylated to form 5-methylcytosine"
gtgggctgggcagaagtgagactgtggcaaggggccccgaggcacaggccttccagctctcgcttcctcttcccttctgcgcatgtgagtagagtttcccttgaagcctcctgcgaggagga

SEQ ID NO: 19938 - DNA, 122 bp, Homo sapiens
  misc_feature (61)..(62): /note="This region represents a CpG dinucleotide"
  misc_feature (61)..(61): /note="Nucleotide may be methylated to form 5-methylcytosine"
ctggatatcgtcagtgagtccccagcggttgtgcaggcaccgggagctggggcagcggggcgggaaggagtgtggccggaaggcctccccgcaccttccccagcaggcctggatggcagatc

SEQ ID NO: 19939 - DNA, 122 bp, Homo sapiens
  misc_feature (61)..(62): /note="This region represents a CpG dinucleotide"
  misc_feature (61)..(61): /note="Nucleotide may be methylated to form 5-methylcytosine"
cgaatgtttccctgggctgctgtcccagcactgggtaccgtggggcagacatgggtgtgacgttttccaagcacgaggtgaccagtgtccattgggtcatcaggcctccagggccacatgtt

SEQ ID NO: 19940 - DNA, 122 bp, Homo sapiens
  misc_feature (61)..(62): /note="This region represents a CpG dinucleotide"
  misc_feature (61)..(61): /note="Nucleotide may be methylated to form 5-methylcytosine"
taagggtgccctaaggtcagggctggccctgagacaaattatgaaattatacaatatggccgggtgcagtgactcacgcctgtaatcccagcactttgggaggccgaggcgggtggatcaca

SEQ ID NO: 19941 - DNA, 122 bp, Homo sapiens
  misc_feature (61)..(62): /note="This region represents a CpG dinucleotide"
  misc_feature (61)..(61): /note="Nucleotide may be methylated to form 5-methylcytosine"
gagtcctctcaggagaaatgaaagcgctgtctctttaggtgcccactccttacccaccagcggagcaatgttttccaggctggccaggctccagaagctcactaaggaagttggcttggggc

SEQ ID NO: 19942 - DNA, 122 bp, Homo sapiens
  misc_feature (61)..(62): /note="This region represents a CpG dinucleotide"
  misc_feature (61)..(61): /note="Nucleotide may be methylated to form 5-methylcytosine"
gtcaaccaggccactgcctacccggccctgtcctgctccaccactccctgtgctcaggtacgcagcacatctgtgccacgccactccctgtgccccaggcacacggtacatctgtgctatga

SEQ ID NO: 19943 - DNA, 122 bp, Homo sapiens
  misc_feature (61)..(62): /note="This region represents a CpG dinucleotide"
  misc_feature (61)..(61): /note="Nucleotide may be methylated to form 5-methylcytosine"
caagtctgttaagagtcctagctcagtgctggaatcaagcaagagctctgaagcagcctccgtaagctactgtaagcctccttctcttccaggacagaatccaatttcttaagcaattgtgg

SEQ ID NO: 19944 - DNA, 122 bp, Homo sapiens
  misc_feature (61)..(62): /note="This region represents a CpG dinucleotide"
  misc_feature (61)..(61): /note="Nucleotide may be methylated to form 5-methylcytosine"
gcctggtaaattgcaatcaacatgtcattgaatcctggcatcctgtctgcactaggtgtacgtattacctattgcttcacagtaaaattccccaaaacgtattagattgagctggtccacct

SEQ ID NO: 19945 - DNA, 122 bp, Homo sapiens
  misc_feature (61)..(62): /note="This region represents a CpG dinucleotide"
  misc_feature (61)..(61): /note="Nucleotide may be methylated to form 5-methylcytosine"
ctgtcacctggagcttgtgctgtgcttgggcagggcttgaactggggagtcctgggacaccgttctttttttatgaggctttgggatggttcctatttgtttgacaaggagagataaacagc

SEQ ID NO: 19946 - DNA, 122 bp, Homo sapiens
  misc_feature (61)..(62): /note="This region represents a CpG dinucleotide"
  misc_feature (61)..(61): /note="Nucleotide may be methylated to form 5-methylcytosine"
gacacgctagaggtgagtctcttaggagaaagttcactagctttccccctgtgctaagaacggcctttgctctaacactcatcctgtctgctgggcagcaagcacagtggaggagatttccg

SEQ ID NO: 19947 - DNA, 122 bp, Homo sapiens
  misc_feature (61)..(62): /note="This region represents a CpG dinucleotide"
  misc_feature (61)..(61): /note="Nucleotide may be methylated to form 5-methylcytosine"
ggaagagagaagaatttgcaaatgaactgacaatggatttaacaggttttagcctgaggtcgcttaaaattttgaacaccacttgcttaggaaacgggggcagtctggaagcaagcactagt

SEQ ID NO: 19948 - DNA, 122 bp, Homo sapiens
  misc_feature (61)..(62): /note="This region represents a CpG dinucleotide"
  misc_feature (61)..(61): /note="Nucleotide may be methylated to form 5-methylcytosine"
ctccaatgtacaaggttctgagtggcctggctgtgcctgcccctcggcctttccccgcagcgtcatgagtcatcttgctctgggcactgcaaccacagggcctgtttgtggattccaaacac

SEQ ID NO: 19949 - DNA, 122 bp, Homo sapiens
  misc_feature (61)..(62): /note="This region represents a CpG dinucleotide"
  misc_feature (61)..(61): /note="Nucleotide may be methylated to form 5-methylcytosine"
cactggtgaaagagcaaataaatccttccccactatatttcctgcttcaggcccaggggccgtggtggacagtgttgccaggttagcataacttgaggtctgagcacgtagacacccactta

SEQ ID NO: 19950 - DNA, 122 bp, Homo sapiens
  misc_feature (61)..(62): /note="This region represents a CpG dinucleotide"
  misc_feature (61)..(61): /note="Nucleotide may be methylated to form 5-methylcytosine"
gagggccggcgaggcgccgggcatgtgcggcagggtggcgctgtcgaagcctgcccctctcggtgggcggcagccccccggatcacttccctcagatgtccccaggccctgtccctgggcgt

SEQ ID NO: 19951 - DNA, 122 bp, Homo sapiens
  misc_feature (61)..(62): /note="This region represents a CpG dinucleotide"
  misc_feature (61)..(61): /note="Nucleotide may be methylated to form 5-methylcytosine"
cagcccctggatatgggcagggcacctaggaaagctgaaaaacaagtagttgcatttggccgggctgtgtttcagatgaagaactggaagacaaccccaaccagagtgacctgattgagcag

SEQ ID NO: 19952 - DNA, 122 bp, Homo sapiens
  misc_feature (61)..(62): /note="This region represents a CpG dinucleotide"
  misc_feature (61)..(61): /note="Nucleotide may be methylated to form 5-methylcytosine"
taaccatatgtaaatattctctttaagtatttaccaccgtaaatgaaggaaagccatccacggcttgggctgatgtaaccaggaagtattccaatgatgtgaattattaatgtagaataaag

SEQ ID NO: 19953 - DNA, 122 bp, Homo sapiens
  misc_feature (61)..(62): /note="This region represents a CpG dinucleotide"
  misc_feature (61)..(61): /note="Nucleotide may be methylated to form 5-methylcytosine"
gttggggatgggtgggcaataagtggtcagcctgggaaggcagacccccagctccgtccccgccaggctggactgtgtctggttccccccatcgtgcctgggccctcatctctccttccccg

SEQ ID NO: 19954 - DNA, 122 bp, Homo sapiens
  misc_feature (61)..(62): /note="This region represents a CpG dinucleotide"
  misc_feature (61)..(61): /note="Nucleotide may be methylated to form 5-methylcytosine"
ggcctcagggacttgcaggggccttcccaagggcttcacaggcagaagcatctcctcatgcggcatgtgactcacctgttattgctgcatttgacagggaagacggaacctgagtcactgag

SEQ ID NO: 19955 - DNA, 122 bp, Homo sapiens
  misc_feature (61)..(62): /note="This region represents a CpG dinucleotide"
  misc_feature (61)..(61): /note="Nucleotide may be methylated to form 5-methylcytosine"
ggtgattcaaagggggcgttttctaaaggagctgtttacaaaggagtggacatggtacaacgtacagggtacagggacagggaaaccaccaggcacagtgcacactccaaggccaggggcct

SEQ ID NO: 19956 - DNA, 122 bp, Homo sapiens
  misc_feature (61)..(62): /note="This region represents a CpG dinucleotide"
  misc_feature (61)..(61): /note="Nucleotide may be methylated to form 5-methylcytosine"
cacacttatttcaatgtttaatattagaagtgttttggtctttatttcgaagtttaggggcgattttgtgaccacagatatgttgtaggaacttcactcatatcaattagcctgtggtcaaa

SEQ ID NO: 19957 - DNA, 122 bp, Homo sapiens
  misc_feature (61)..(62): /note="This region represents a CpG dinucleotide"
  misc_feature (61)..(61): /note="Nucleotide may be methylated to form 5-methylcytosine"
aatcttaggaggggcctgaataagaaatttaaactattaaatagtgttttggaagagagacgtatgatatttgtgcaaaataataatgaggttaaaaatggaatttcagccttagctgaaag

SEQ ID NO: 19958 - DNA, 122 bp, Homo sapiens
  misc_feature (61)..(62): /note="This region represents a CpG dinucleotide"
  misc_feature (61)..(61): /note="Nucleotide may be methylated to form 5-methylcytosine"
ggcagctgtggtgattggcggggagacctacggcgtgagcctggagtccctgcagctggccgagagcactggtggcaagaggctgctgatccccgttgtgcctggtgtggacagcctcaact

SEQ ID NO: 19959 - DNA, 122 bp, Homo sapiens
  misc_feature (61)..(62): /note="This region represents a CpG dinucleotide"
  misc_feature (61)..(61): /note="Nucleotide may be methylated to form 5-methylcytosine"
cacaaattctgcattcaaatagttccccactacaaagttaattccaacatcttagactagcgttctatgtcatctatctgactcactttaccagtccaactcaattcccttacctcctactt

SEQ ID NO: 19960 - DNA, 122 bp, Homo sapiens
  misc_feature (61)..(62): /note="This region represents a CpG dinucleotide"
  misc_feature (61)..(61): /note="Nucleotide may be methylated to form 5-methylcytosine"
tctccttcaattgtattggtacgtctttttcatttcttgtggccttcatgaagaaatgaacggtgcagaatggttggtcaatgataatgccaacaatagttatgactaaatgatgattcact

SEQ ID NO: 19961 - DNA, 122 bp, Homo sapiens
  misc_feature (61)..(62): /note="This region represents a CpG dinucleotide"
  misc_feature (61)..(61): /note="Nucleotide may be methylated to form 5-methylcytosine"
tggggaacccaggaggatgcgactcagggtgtctggacaagcgtgggggtggggacaatacgtaagcaccaggccacaaggagagctccagctatgcactagctgcgatgttagatgaggaa

SEQ ID NO: 19962 - DNA, 122 bp, Homo sapiens
  misc_feature (61)..(62): /note="This region represents a CpG dinucleotide"
  misc_feature (61)..(61): /note="Nucleotide may be methylated to form 5-methylcytosine"
tttgtgcggacttgaagtgcagttaagtatgagaaaaggagattagctggtacatgcacacgttctgtaacagaacacagcctgtctgctggagagatgacagtgaatgagtcccccatcct

SEQ ID NO: 19963 - DNA, 122 bp, Homo sapiens
  misc_feature (61)..(62): /note="This region represents a CpG dinucleotide"
  misc_feature (61)..(61): /note="Nucleotide may be methylated to form 5-methylcytosine"
cttaaaaccctttaatcctcatcatgtacaggatgtaagatccaaactccttgtaaagggcgtatgaaatcctctgcgatctgctccttgtctactcttggatcttgtccttagtaactcca

SEQ ID NO: 19964 - DNA, 122 bp, Homo sapiens
  misc_feature (61)..(62): /note="This region represents a CpG dinucleotide"
  misc_feature (61)..(61): /note="Nucleotide may be methylated to form 5-methylcytosine"
caagtttgccaacaccatggagttcgtggaggactacctcaacaatgtagtcagcgaggccgtgccctttgccaacgaggagaagaacaagctcacttttgaggtggctgggggagtgccca

SEQ ID NO: 19965 - DNA, 122 bp, Homo sapiens
  misc_feature (61)..(62): /note="This region represents a CpG dinucleotide"
  misc_feature (61)..(61): /note="Nucleotide may be methylated to form 5-methylcytosine"
tgcccacattttgtagtggaactctctgaactgcttttgtgttgagtgctacctttttcacgaatcttttttttctgcccagttaaacactgttcaatttaattaaaggttctttttttttt

SEQ ID NO: 19966 - DNA, 122 bp, Homo sapiens
  misc_feature (61)..(62): /note="This region represents a CpG dinucleotide"
  misc_feature (61)..(61): /note="Nucleotide may be methylated to form 5-methylcytosine"
ctttgttcaaatttctacccacaaatcaaaactgttttaatcttcattatctcagtaaagcgcatgtgacaaaagtaaatggagaagacgtctagaaatgttgtgagggttctctggggtta

SEQ ID NO: 19967 - DNA, 122 bp, Homo sapiens
  misc_feature (61)..(62): /note="This region represents a CpG dinucleotide"
  misc_feature (61)..(61): /note="Nucleotide may be methylated to form 5-methylcytosine"
tgaatcctccaactttgtttttctttttcaaaattgtcttggcaattctagttcctttgccgttccatataaattttagaatcagtttgttattttttataaaaagattgctggggatttga

SEQ ID NO: 19968 - DNA, 122 bp, Homo sapiens
  misc_feature (61)..(62): /note="This region represents a CpG dinucleotide"
  misc_feature (61)..(61): /note="Nucleotide may be methylated to form 5-methylcytosine"
attgcaagaaatatttgcttaagcaatacatttattattcataggtcagagcttggaaagcggcaggtgcacaggagcccttgacaatggcaaagcatgatcacatgtttaccgccaagaca

SEQ ID NO: 19969 - DNA, 122 bp, Homo sapiens
  misc_feature (61)..(62): /note="This region represents a CpG dinucleotide"
  misc_feature (61)..(61): /note="Nucleotide may be methylated to form 5-methylcytosine"
taaggtaaataactatgagacgagagacaagtgtgaaaacattgtgttttctttccaggacgctgaattgaactgatgtcattgtaaaaagggaaatgagttctctggctaggtttggggaa

SEQ ID NO: 19970 - DNA, 122 bp, Homo sapiens
  misc_feature (61)..(62): /note="This region represents a CpG dinucleotide"
  misc_feature (61)..(61): /note="Nucleotide may be methylated to form 5-methylcytosine"
cgccgtgcaggaagtcccggggcaatagggcaggaaaaggaaaggaagacatacatgatccgacatgtagaaaatccttttaaggccgggtgtcgtggctcacgtaatcccagcactttggg

SEQ ID NO: 19971 - DNA, 122 bp, Homo sapiens
  misc_feature (61)..(62): /note="This region represents a CpG dinucleotide"
  misc_feature (61)..(61): /note="Nucleotide may be methylated to form 5-methylcytosine"
ctaggctcatatctcaccctacaccagcgttcatgatgtgggatttctgagctgactgcacgtgagacccggccaggtcttgactcactgcctgaattttccacgtctttctggagataaag

SEQ ID NO: 19972 - DNA, 122 bp, Homo sapiens
  misc_feature (61)..(62): /note="This region represents a CpG dinucleotide"
  misc_feature (61)..(61): /note="Nucleotide may be methylated to form 5-methylcytosine"
gagtgcattcagtaataatctcaagcttatcataactcaaatggtatttcacactcacttcgctgcaacaagagttacactctgtttaagatcatcacaacacaccttcattaatgcagagg

SEQ ID NO: 19973 - DNA, 122 bp, Homo sapiens
  misc_feature (61)..(62): /note="This region represents a CpG dinucleotide"
  misc_feature (61)..(61): /note="Nucleotide may be methylated to form 5-methylcytosine"
gaaaggcatatcagtgttgatagctgtggaggataagaacgctgacaataataatgagtacgataatatcagtgccttggatttatgcagtatcattacttcggggctttgcgtgcctccta

SEQ ID NO: 19974 - DNA, 122 bp, Homo sapiens
  misc_feature (61)..(62): /note="This region represents a CpG dinucleotide"
  misc_feature (61)..(61): /note="Nucleotide may be methylated to form 5-methylcytosine"
taaaagctatatggcctttcctgatctggctttggaaggcatccagcctcacttccactacgttctattagtaacaggcaaatcataagaccagctcaagcttcaaggaaaggggaattaat

SEQ ID NO: 19975 - DNA, 122 bp, Homo sapiens
  misc_feature (61)..(62): /note="This region represents a CpG dinucleotide"
  misc_feature (61)..(61): /note="Nucleotide may be methylated to form 5-methylcytosine"
gtcggcgaggaggctggagcagcgggtaggaagcgggccgaggctcccccgacgctgggccgcaactgtcatcgcagatccctgaaaaacgagctctgtaatcgttgccgtcagcgggtgta

SEQ ID NO: 19976 - DNA, 122 bp, Homo sapiens
  misc_feature (61)..(62): /note="This region represents a CpG dinucleotide"
  misc_feature (61)..(61): /note="Nucleotide may be methylated to form 5-methylcytosine"
ctcatccccgcccctcccacagcccagccccccccttcctgtttgacaactgccacttcccgcttttgcacagggccacttcctgcctgcctgtgtgctactgccatggagagacccacccc

SEQ ID NO: 19977 - DNA, 122 bp, Homo sapiens
  misc_feature (61)..(62): /note="This region represents a CpG dinucleotide"
  misc_feature (61)..(61): /note="Nucleotide may be methylated to form 5-methylcytosine"
atagccggtgagttttccttggcactagcaagtgggatcattaactgtctccatttggttcggatgtagaattattaaacctgtggttctggtcttgagagccaatgcctggcaggtgactg

SEQ ID NO: 19978 - DNA, 122 bp, Homo sapiens
  misc_feature (61)..(62): /note="This region represents a CpG dinucleotide"
  misc_feature (61)..(61): /note="Nucleotide may be methylated to form 5-methylcytosine"
acagctgatggggatgaggtgtaactcacacatcctaaaagcttcaacagggcactggagcgccgctgaccaagttactggcattttctattgccaggaagccgcattctcctctctgctaa

SEQ ID NO: 19979 - DNA, 122 bp, Homo sapiens
  misc_feature (61)..(62): /note="This region represents a CpG dinucleotide"
  misc_feature (61)..(61): /note="Nucleotide may be methylated to form 5-methylcytosine"
atactgctttgctcagccatgctcctagcttctccaacagacatggagtcttgctggtcacgaaatctcttgtttcatacatgttcctcctcttctcctgtgaccctggggtccctcagtct

SEQ ID NO: 19980 - DNA, 122 bp, Homo sapiens
  misc_feature (61)..(62): /note="This region represents a CpG dinucleotide"
  misc_feature (61)..(61): /note="Nucleotide may be methylated to form 5-methylcytosine"
ctgatctcatgccatttccttcccctgtcaactctgcagccagatgcttctaaataaagacgcgctctctcactgtggaacttcccatgtgttttttgttttgttttgtttttgagatggag

SEQ ID NO: 19981 - DNA, 122 bp, Homo sapiens
  misc_feature (61)..(62): /note="This region represents a CpG dinucleotide"
  misc_feature (61)..(61): /note="Nucleotide may be methylated to form 5-methylcytosine"
ctcttcagtgttagttgtgcaaagtccctctggccatggcagtgagcggttgggctgtgccgccaaactctccgtatcaatctggcctgggactcaaccaagtgatctctgacttttggaaa

SEQ ID NO: 19982 - DNA, 122 bp, Homo sapiens
  misc_feature (61)..(62): /note="This region represents a CpG dinucleotide"
  misc_feature (61)..(61): /note="Nucleotide may be methylated to form 5-methylcytosine"
caaaaacaagttcattatctccggctttgatatttgttcccagtggtggagcctgtgcagcggggtctttgttcacgggctaatgcttctcctaagcacctcgtgtgtgttcttcggcctca

SEQ ID NO: 19983 - DNA, 122 bp, Homo sapiens
  misc_feature (61)..(62): /note="This region represents a CpG dinucleotide"
  misc_feature (61)..(61): /note="Nucleotide may be methylated to form 5-methylcytosine"
tcagttggctttcaaaaataaagcatcattttttctagagctttcttcttttgctgaatacgaaaacaaatgtaaaaaggaagtaactcattgagaaagggaagctggtgacacaggaaatg

SEQ ID NO: 19984 - DNA, 122 bp, Homo sapiens
  misc_feature (61)..(62): /note="This region represents a CpG dinucleotide"
  misc_feature (61)..(61): /note="Nucleotide may be methylated to form 5-methylcytosine"
tcgattttccaaaccaaagtggatgttgtgcaatgacaagggtttcctgggaaagttctgcggacaccccctccactgttctccagcttttctctagagttctgagtgtattttcctgttgt

SEQ ID NO: 19985 - DNA, 122 bp, Homo sapiens
  misc_feature (61)..(62): /note="This region represents a CpG dinucleotide"
  misc_feature (61)..(61): /note="Nucleotide may be methylated to form 5-methylcytosine"
tgtggcaccaggtgtccctctggttccaggaggctcatctctctgcctccagtccatgggcggcaggtaaatccttgccttagagaaagccacagacggtgctgcctggaatttgaggtggc

SEQ ID NO: 19986 - DNA, 122 bp, Homo sapiens
  misc_feature (61)..(62): /note="This region represents a CpG dinucleotide"
  misc_feature (61)..(61): /note="Nucleotide may be methylated to form 5-methylcytosine"
gcggcccgcaggggcagatgggactcggccactttcggcacgctgggctgaaagtgggcgcgtctgcgactgggagggggtcggagagaagccacaaagcccgggctgcagaggcggttctg

SEQ ID NO: 19987 - DNA, 122 bp, Homo sapiens
  misc_feature (61)..(62): /note="This region represents a CpG dinucleotide"
  misc_feature (61)..(61): /note="Nucleotide may be methylated to form 5-methylcytosine"
catttaacagatgagccccagggatgttaaacaacccttccaagtcacatggctggaccacggtgctgggcctgtacctaggtctcctggctcttcccactacagtgtactggctaccacct

SEQ ID NO: 19988 - DNA, 122 bp, Homo sapiens
  misc_feature (61)..(62): /note="This region represents a CpG dinucleotide"
  misc_feature (61)..(61): /note="Nucleotide may be methylated to form 5-methylcytosine"
taagtgttgtttatcaagagaaactatttcttagcccacatattcccatttcttagttcacgaacacaggtcagtgacaagcacctgaggtttcttcaaagcactggaagccattgtttatg

SEQ ID NO: 19989 - DNA, 122 bp, Homo sapiens
  misc_feature (61)..(62): /note="This region represents a CpG dinucleotide"
  misc_feature (61)..(61): /note="Nucleotide may be methylated to form 5-methylcytosine"
agaaacctgcatggcaggtgcacacggtgttctgtttctcctggcctgtagggagaagtgcggcacagctaaaggagaagcgcctgcacccccaccccacaggacagaggaagtgacgaggg

SEQ ID NO: 19990 - DNA, 122 bp, Homo sapiens
  misc_feature (61)..(62): /note="This region represents a CpG dinucleotide"
  misc_feature (61)..(61): /note="Nucleotide may be methylated to form 5-methylcytosine"
caagtgtccttgcacaagccaggcaaagggagattagacgcacagcaagagaggaggcaacgtggccaccaaggcagaaattagaataatacggccacatgtcaaggagagccagcagccac

SEQ ID NO: 19991 - DNA, 122 bp, Homo sapiens
  misc_feature (61)..(62): /note="This region represents a CpG dinucleotide"
  misc_feature (61)..(61): /note="Nucleotide may be methylated to form 5-methylcytosine"
ataaatttatttatacaaaatctggggtaaagatctaccttttagatcacatatttgaaacgtctgggcatgcctaattctatgtgttcaggtgtttctgagggtcataggtaaaagcatgt

SEQ ID NO: 19992 - DNA, 122 bp, Homo sapiens
  misc_feature (61)..(62): /note="This region represents a CpG dinucleotide"
  misc_feature (61)..(61): /note="Nucleotide may be methylated to form 5-methylcytosine"
ccaaacacaaaaggaaacaactttctatttagctcatttctaaggtaaccattgtatcgccggtgaaacagttcaggcataaattggacagagtctgaaaggtctctgattccattttgttt

SEQ ID NO: 19993 - DNA, 122 bp, Homo sapiens
  misc_feature (61)..(62): /note="This region represents a CpG dinucleotide"
  misc_feature (61)..(61): /note="Nucleotide may be methylated to form 5-methylcytosine"
tctgtaaggaaggaggtgaggtcacttgcgagcatgctgggctggaagttaggtaatgagcgtaaggagcaccttaaaagtttggaacagctccctagtggatagctaggggccaggaagga

SEQ ID NO: 19994 - DNA, 122 bp, Homo sapiens
  misc_feature (61)..(62): /note="This region represents a CpG dinucleotide"
  misc_feature (61)..(61): /note="Nucleotide may be methylated to form 5-methylcytosine"
gggaagaggctgtgcttttcctctgagaaagatgacgttgcactttcatattgaggaaaccgcttgtggttggtggtggggactggtttttatttttatttttatttttttattttattttt

SEQ ID NO: 19995 - DNA, 122 bp, Homo sapiens
  misc_feature (61)..(62): /note="This region represents a CpG dinucleotide"
  misc_feature (61)..(61): /note="Nucleotide may be methylated to form 5-methylcytosine"
ttccccaggcactgcttagctccgtatactggtctcccaggaggcagagccaatctctagcgcctattctgtgaggcagggttgcaccaccagctagtacagccttaaaagtcactccccaa

SEQ ID NO: 19996 - DNA, 122 bp, Homo sapiens
  misc_feature (61)..(62): /note="This region represents a CpG dinucleotide"
  misc_feature (61)..(61): /note="Nucleotide may be methylated to form 5-methylcytosine"
ttagttttagtaactttagtaacttcttacaaaggcctccatgagaccatggtctgtgtccgctgtgagactccaatataaacaggagtgggaaaggagatttgagagtagagacgtgtagg

SEQ ID NO: 19997 - DNA, 122 bp, Homo sapiens
  misc_feature (61)..(62): /note="This region represents a CpG dinucleotide"
  misc_feature (61)..(61): /note="Nucleotide may be methylated to form 5-methylcytosine"
atcatcaaggatcagtcttcaatggtctttccatcttttggagctgtcatagtaaccatacgaaatgacttcctttgtggtcataaaatgcctgtcacagctctaggtcttatatcctcaca

SEQ ID NO: 19998 - DNA, 122 bp, Homo sapiens
  misc_feature (61)..(62): /note="This region represents a CpG dinucleotide"
  misc_feature (61)..(61): /note="Nucleotide may be methylated to form 5-methylcytosine"
cctaactgtaattcctgttttcctttatccacctgattagactttgaagtccttaagacccggaataatgagcctgttattgttatctctgtaacacaggcattacatgcatacttacatag

SEQ ID NO: 19999 - DNA, 122 bp, Homo sapiens
  misc_feature (61)..(62): /note="This region represents a CpG dinucleotide"
  misc_feature (61)..(61): /note="Nucleotide may be methylated to form 5-methylcytosine"
gcctcagagagagacaagtctggatgagggaaatattgaatattctcaatcaaatggatacgctggcagcaaagagtggttaaaagtccatcaggacttgaaagacctgagtccattacgtt

SEQ ID NO: 20000 - DNA, 122 bp, Homo sapiens
  misc_feature (61)..(62): /note="This region represents a CpG dinucleotide"
  misc_feature (61)..(61): /note="Nucleotide may be methylated to form 5-methylcytosine"
ccaccacctttaccaagtgatcaaatttagcattactaatataactgagttatgcgtccccgtgagttggcaacatctcttaggtagtattgcaaaagtgctcaaactgaatctaatcatga

SEQ ID NO: 20001 - DNA, 122 bp, Homo sapiens
  misc_feature (61)..(62): /note="This region represents a CpG dinucleotide"
  misc_feature (61)..(61): /note="Nucleotide may be methylated to form 5-methylcytosine"
cttccttccttctatgacttatctcagaatgacgttacaattgttattgtgtttgagtgccgacgctgaggcattggctagaaacttctataattaggtgttttctgacactagacaaaatt

SEQ ID NO: 20002 - DNA, 122 bp, Homo sapiens
  misc_feature (61)..(62): /note="This region represents a CpG dinucleotide"
  misc_feature (61)..(61): /note="Nucleotide may be methylated to form 5-methylcytosine"
gacaggatctgacagctttgtattgctggcatccctgggggcatgagctgttcagtgacacgtcagcctccatctgcctctgtgcagcactagatttgggagggaggcttctcagatctcag

SEQ ID NO: 20003 - DNA, 122 bp, Homo sapiens
  misc_feature (61)..(62): /note="This region represents a CpG dinucleotide"
  misc_feature (61)..(61): /note="Nucleotide may be methylated to form 5-methylcytosine"
caggcctcttgggaagaataacactactatttatcattcccttaatcttgtgccaaacaccgtgctaagccctttccattcatcatctcaatccccacaacagcctggttagatagacgttc

SEQ ID NO: 20004 - DNA, 122 bp, Homo sapiens
  misc_feature (61)..(62): /note="This region represents a CpG dinucleotide"
  misc_feature (61)..(61): /note="Nucleotide may be methylated to form 5-methylcytosine"
cctcctgatcttttaaagtgcattttacttcctggaaagttgggttcgctggttttcaggcggcaagtttgtgccataaggatgaaggcatgctttagagatggcatagcagtgagatggaa

SEQ ID NO: 20005 - DNA, 122 bp, Homo sapiens
  misc_feature (61)..(62): /note="This region represents a CpG dinucleotide"
  misc_feature (61)..(61): /note="Nucleotide may be methylated to form 5-methylcytosine"
gtgaaccaccgtgcccggccagagcacgagctttttaacctctgttgaggaaacggggaccggtcacggtagctcaggcctgtaatcctagcacttcgggaggctgaggcgggaggatcgct

SEQ ID NO: 20006 - DNA, 122 bp, Homo sapiens
  misc_feature (61)..(62): /note="This region represents a CpG dinucleotide"
  misc_feature (61)..(61): /note="Nucleotide may be methylated to form 5-methylcytosine"
ttgggatataaaaatttcatgcctagagctttaaagttgtaccccaaatgctttctaaagcggttgtgtgcctcaggaatagttaaagctgcctcacagtgtacaacagtgttctcagttct

SEQ ID NO: 20007 - DNA, 122 bp, Homo sapiens
  misc_feature (61)..(62): /note="This region represents a CpG dinucleotide"
  misc_feature (61)..(61): /note="Nucleotide may be methylated to form 5-methylcytosine"
gtttcattagcatttggggctcatcctccctccccctcccttgacccacccccctccccccgccggacctctgccaggggcagaagagaaaacagccagttattatacaaacatcctcagtt

SEQ ID NO: 20008 - DNA, 122 bp, Homo sapiens
  misc_feature (61)..(62): /note="This region represents a CpG dinucleotide"
  misc_feature (61)..(61): /note="Nucleotide may be methylated to form 5-methylcytosine"
gcctgtggccgctgggaggctgcgccatggcccgctccggagagctgcgaggtggctctgcgaggtttggctggagctgggcagcgaggcctgcccacgggtgggagagccgccgacccgtc

SEQ ID NO: 20009 - DNA, 122 bp, Homo sapiens
  misc_feature (61)..(62): /note="This region represents a CpG dinucleotide"
  misc_feature (61)..(61): /note="Nucleotide may be methylated to form 5-methylcytosine"
cagaagatttgacaggtgaacaaacacaagtccagaagggacatgactggcccaagatcacgccaccagctaatgccagacaggcgatgagaaccagttgtctcatacctttgccttgtaaa

SEQ ID NO: 20010 - DNA, 122 bp, Homo sapiens
  misc_feature (61)..(62): /note="This region represents a CpG dinucleotide"
  misc_feature (61)..(61): /note="Nucleotide may be methylated to form 5-methylcytosine"
gccactgtactgagacacatttcttgagcacctgccacactatggcagaagcctaacacacgaggtggtaatttgccatggaagaacttagcaaagaaaatttgaccattatattttcagga

SEQ ID NO: 20011 - DNA, 122 bp, Homo sapiens
  misc_feature (61)..(62): /note="This region represents a CpG dinucleotide"
  misc_feature (61)..(61): /note="Nucleotide may be methylated to form 5-methylcytosine"
acgcagaaagatgaaataacttgcccaaggtcacgcaggcccagtataaataacaccagtcgccccaacttattaagctcctactgtgttacctgctatagggtaaagcttttacctgcctt

SEQ ID NO: 20012 - DNA, 122 bp, Homo sapiens
  misc_feature (61)..(62): /note="This region represents a CpG dinucleotide"
  misc_feature (61)..(61): /note="Nucleotide may be methylated to form 5-methylcytosine"
aatcaatccccaaaaccagtgagcctgagtgcaccagggaatccctcccaccatctccagcgatgcttccactcagggactttctgtagggtgaagaacaggggattcaattccacaagtgt

SEQ ID NO: 20013 - DNA, 122 bp, Homo sapiens
  misc_feature (61)..(62): /note="This region represents a CpG dinucleotide"
  misc_feature (61)..(61): /note="Nucleotide may be methylated to form 5-methylcytosine"
ataccaatctggactacacccttaggactcataattcatttgcttctttttgtcctctgtcgcccaggctagagtgcagtggtgtgatctcagctcactgcaacctccgcctcctaggttca

SEQ ID NO: 20014 - DNA, 122 bp, Homo sapiens
  misc_feature (61)..(62): /note="This region represents a CpG dinucleotide"
  misc_feature (61)..(61): /note="Nucleotide may be methylated to form 5-methylcytosine"
gagaaaacaggcatgttaaagcggttaagcaacgtcctcgaggtcactcagccagtaagacgttaactgagcctaggttcaatctaggtctatcaggcagcaaagtgttttattacttggga

SEQ ID NO: 20015 - DNA, 122 bp, Homo sapiens
  misc_feature (61)..(62): /note="This region represents a CpG dinucleotide"
  misc_feature (61)..(61): /note="Nucleotide may be methylated to form 5-methylcytosine"
ctgataccagtttcatcaccacgacccttggtatacatctgttccttcctctgcttcttacgcagtctccttttctagttactctagtcatgaatcccaacatttgattgctagatattttc

SEQ ID NO: 20016 - DNA, 122 bp, Homo sapiens
  misc_feature (61)..(62): /note="This region represents a CpG dinucleotide"
  misc_feature (61)..(61): /note="Nucleotide may be methylated to form 5-methylcytosine"
agactcaactgggctaacataggggcaaagttggtatcccaagcttctcagctatctatccgcccaaagttgctcttctgccaagctcattgtttaccaagctgccagcccagcccagggat

SEQ ID NO: 20017 - DNA, 122 bp, Homo sapiens
  misc_feature (61)..(62): /note="This region represents a CpG dinucleotide"
  misc_feature (61)..(61): /note="Nucleotide may be methylated to form 5-methylcytosine"
atgtggtgatgcacgtgcactagcaggcatgcagacacacgccaacttgcagcccgcaaacgcccacagacccagacacgcagacgcacgctccagagcccacacggtgccccggcctccct

SEQ ID NO: 20018 - DNA, 122 bp, Homo sapiens
  misc_feature (61)..(62): /note="This region represents a CpG dinucleotide"
  misc_feature (61)..(61): /note="Nucleotide may be methylated to form 5-methylcytosine"
ctggtggaaggaggaattcttcctcctctttctcgtctttctgggcaggtattgtgaggacggtatctgccctgtcagtatctacccaaacaatccagagctgtcaacagaaaaaccctctg

SEQ ID NO: 20019 - DNA, 122 bp, Homo sapiens
  misc_feature (61)..(62): /note="This region represents a CpG dinucleotide"
  misc_feature (61)..(61): /note="Nucleotide may be methylated to form 5-methylcytosine"
aaacaactccaacaggttcatgagcagctcatccaccaggtgctcgtcttggatgttggccgcgatgttggccagggcattaatcactgccagggagcaatgcctgaagaagaaggagtgaa

SEQ ID NO: 20020 - DNA, 122 bp, Homo sapiens
  misc_feature (61)..(62): /note="This region represents a CpG dinucleotide"
  misc_feature (61)..(61): /note="Nucleotide may be methylated to form 5-methylcytosine"
agctccatagatttccctgagaggactttgtttacttgggaaagggaatggagaactttccgggctaagtttgttgttgaaagcaatacagatcttggtgaagagcaattaataggaggctg

SEQ ID NO: 20021 - DNA, 122 bp, Homo sapiens
  misc_feature (61)..(62): /note="This region represents a CpG dinucleotide"
  misc_feature (61)..(61): /note="Nucleotide may be methylated to form 5-methylcytosine"
agcagtgggaagggtagagaagagaaaacaagaaagtgagaatgtgtcatccattgaagacgcaggatgataaaaagcctacaaattaactcagtaccacagcaatgttctcactgctgctt

SEQ ID NO: 20022 - DNA, 122 bp, Homo sapiens
  misc_feature (61)..(62): /note="This region represents a CpG dinucleotide"
  misc_feature (61)..(61): /note="Nucleotide may be methylated to form 5-methylcytosine"
agtctgtgtcccttcttagagcctaactctgttcctcagccctcccgcccagtgacacttcgtaggactcattgcccaggaatcctgctcagtcattgcattgcccggctctgacctgggat

SEQ ID NO: 20023 - DNA, 122 bp, Homo sapiens
  misc_feature (61)..(62): /note="This region represents a CpG dinucleotide"
  misc_feature (61)..(61): /note="Nucleotide may be methylated to form 5-methylcytosine"
ccagattttacactgagtgaattaagccggttactatttatctaagcctataatctcacccgtaagatagagatgatatttgctcaaatgattgttgtggaaataaaactgtgaatgtttaa

SEQ ID NO: 20024 - DNA, 122 bp, Homo sapiens
  misc_feature (61)..(62): /note="This region represents a CpG dinucleotide"
  misc_feature (61)..(61): /note="Nucleotide may be methylated to form 5-methylcytosine"
gcaatagataattcttaaagacatttaaattagaagataccttctctagctttgcagaaacgctgaaagtggttgctagtaagcacacaaactcaaacttctagaattttcctcattgttac

SEQ ID NO: 20025 - DNA, 122 bp, Homo sapiens
  misc_feature (61)..(62): /note="This region represents a CpG dinucleotide"
  misc_feature (61)..(61): /note="Nucleotide may be methylated to form 5-methylcytosine"
tgaacttctgaccttaggtgatccgcctgcctcagcctcccaaagtgctgggactacaggcgtgagccaccgcagtcttaaatggttaatgaggattaggaaatctatcaattattcaacag

SEQ ID NO: 20026 - DNA, 122 bp, Homo sapiens
  misc_feature (61)..(62): /note="This region represents a CpG dinucleotide"
  misc_feature (61)..(61): /note="Nucleotide may be methylated to form 5-methylcytosine"
aacagaacatttccatcacttgtggcctctctgagtcaatctctaccttccctcttgctccggaagcaaccactgatttgatttctatcatcataggttagttttgcttactgtaggatttc

SEQ ID NO: 20027 - DNA, 122 bp, Homo sapiens
  misc_feature (61)..(62): /note="This region represents a CpG dinucleotide"
  misc_feature (61)..(61): /note="Nucleotide may be methylated to form 5-methylcytosine"
ccctagccaggagcctgcctggttggaggctggtcagtgacgttgctgtggagaccaggacggtccagcaagtgaccatggcactggccccaggtggctgctgggtgctgccctgggagcaa

SEQ ID NO: 20028 - DNA, 122 bp, Homo sapiens
  misc_feature (61)..(62): /note="This region represents a CpG dinucleotide"
  misc_feature (61)..(61): /note="Nucleotide may be methylated to form 5-methylcytosine"
agaggccagcagagctttctaaatctcgggtacagtgactgaagcactgggctgggagtccgagtgcctgagctgtggtctggttctgctgcctactaagctgaatgacccaaaagcctctc

SEQ ID NO: 20029 - DNA, 122 bp, Homo sapiens
  misc_feature (61)..(62): /note="This region represents a CpG dinucleotide"
  misc_feature (61)..(61): /note="Nucleotide may be methylated to form 5-methylcytosine"
atttggtcaatttaatattatgcaagagaaattccatttccctagtagttacacaatgcccgctttcagaccagctagtcaaccctgtgagggtcagatagagtagtttatccatttggttg

SEQ ID NO: 20030 - DNA, 122 bp, Homo sapiens
  misc_feature (61)..(62): /note="This region represents a CpG dinucleotide"
  misc_feature (61)..(61): /note="Nucleotide may be methylated to form 5-methylcytosine"
tgtggaccttccattgagaccagtcatcagatggctcaatcacctccataggtgcttctacgtaagtaccagagagtcaagccagaccacagcgctctgggaagttagcccagttcttttgt

SEQ ID NO: 20031 - DNA, 122 bp, Homo sapiens
  misc_feature (61)..(62): /note="This region represents a CpG dinucleotide"
  misc_feature (61)..(61): /note="Nucleotide may be methylated to form 5-methylcytosine"
tctcgtgctttttaatgactccacattggtcagcagatgctcagccaagtcggatgagaccgggttctgccttggtgtccgtgttgctagctggggcaggcaaaggcatgaacttgcaaagt

SEQ ID NO: 20032 - DNA, 122 bp, Homo sapiens
  misc_feature (61)..(62): /note="This region represents a CpG dinucleotide"
  misc_feature (61)..(61): /note="Nucleotide may be methylated to form 5-methylcytosine"
ctatctatcttttgattaatctacctatcaatctttctatctatccataacctgttgattcgatctctctagagaaccctgactaatacacctggagtgcagaatctgctggagaaactgcc

SEQ ID NO: 20033 - DNA, 122 bp, Homo sapiens
  misc_feature (61)..(62): /note="This region represents a CpG dinucleotide"
  misc_feature (61)..(61): /note="Nucleotide may be methylated to form 5-methylcytosine"
acaggcctctccgaagacctaactccgggctgaggacctgatgtcggctcccagcccctgcgccaccccgcagcgttcccgcccctggcccccaggggacaccctattctagagacaatact

SEQ ID NO: 20034 - DNA, 122 bp, Homo sapiens
  misc_feature (61)..(62): /note="This region represents a CpG dinucleotide"
  misc_feature (61)..(61): /note="Nucleotide may be methylated to form 5-methylcytosine"
ggcaaagaggaccagcccaggaagggggcacatttccacatatcacccaagagcctctcacgctggctcagacccacagacaagactgggaagatccgcccacagaatgttcctccttgccc

SEQ ID NO: 20035 - DNA, 122 bp, Homo sapiens
  misc_feature (61)..(62): /note="This region represents a CpG dinucleotide"
  misc_feature (61)..(61): /note="Nucleotide may be methylated to form 5-methylcytosine"
gggaggatgtagaaattcctatttgtaagggtttgcgatctgggtatatgtccactgagccgtgaacttactgtctcgagttctgtattctagttgggactgttctgctaactgctggaggg

SEQ ID NO: 20036 - DNA, 122 bp, Homo sapiens
  misc_feature (61)..(62): /note="This region represents a CpG dinucleotide"
  misc_feature (61)..(61): /note="Nucleotide may be methylated to form 5-methylcytosine"
cacttcccagcccacgtgctggcagaattcagttccttgtggctgtaggactcatagcagcgtgcttcttcacagctgacaataggatgagtgtgctggcaagactgagtcttacaaatgta

SEQ ID NO: 20037 - DNA, 122 bp, Homo sapiens
  misc_feature (61)..(62): /note="This region represents a CpG dinucleotide"
  misc_feature (61)..(61): /note="Nucleotide may be methylated to form 5-methylcytosine"
gtggttgagcatgacatgctctttggtttatgcaggccgcacagcagccatctagacacacgcaaagcagcacagctgagctttaggacatcatgtgcttctgcagtgacaactgaaaaaaa

SEQ ID NO: 20038 - DNA, 122 bp, Homo sapiens
  misc_feature (61)..(62): /note="This region represents a CpG dinucleotide"
  misc_feature (61)..(61): /note="Nucleotide may be methylated to form 5-methylcytosine"
gccaggctttgtctatgtagctgtgcccagagcaagtttgcccagggatacggtgcgctccgcgagcatctgctgggcttgcacaggggacggggagggacctctggtttcatttctctgcc

SEQ ID NO: 20039 - DNA, 122 bp, Homo sapiens
  misc_feature (61)..(62): /note="This region represents a CpG dinucleotide"
  misc_feature (61)..(61): /note="Nucleotide may be methylated to form 5-methylcytosine"
gagccttctccacctccgtgatgcctccgggttcgtgcatggccacttgtgctgcgtgagcgtcgtaggtttaggggaacagaagtagagggatttacatgagcttttaaaatcccaaatag

SEQ ID NO: 20040 - DNA, 122 bp, Homo sapiens
  misc_feature (61)..(62): /note="This region represents a CpG dinucleotide"
  misc_feature (61)..(61): /note="Nucleotide may be methylated to form 5-methylcytosine"
ctgtgcagttgtgaagaaaaaaaattaatgcatagcatacacagggtttggtactatcctcgatttcaggcatcaaccaggcatcttgaaatgtagtccccatggttaagggcaggctactt

SEQ ID NO: 20041 - DNA, 122 bp, Homo sapiens
  misc_feature (61)..(62): /note="This region represents a CpG dinucleotide"
  misc_feature (61)..(61): /note="Nucleotide may be methylated to form 5-methylcytosine"
aaaataaaagctatttttcctctctgacttggcaaccctgcttgaagttaggtttaggctcgctttttaaatcagtctgtgtgtgtgtgtgtgtgtgtgtgtgtgtgtgtgtgtgtgtgtgt

SEQ ID NO: 20042 - DNA, 122 bp, Homo sapiens
  misc_feature (61)..(62): /note="This region represents a CpG dinucleotide"
  misc_feature (61)..(61): /note="Nucleotide may be methylated to form 5-methylcytosine"
aattctgcacctttaataaagttttatgggacaggaaggtgactggcattgacattgtaacgaggaatgggtggtgccacctttgctgtgtcttaccagaaatacctgtggcaggtaaattt

SEQ ID NO: 20043 - DNA, 122 bp, Homo sapiens
  misc_feature (61)..(62): /note="This region represents a CpG dinucleotide"
  misc_feature (61)..(61): /note="Nucleotide may be methylated to form 5-methylcytosine"
aggtacccaaactgcaatttgcagaacctctctgcttaaagttctcccatcccagacccccgtctcatgatgcccgtgccactatctctagaggtaggcatcgtacttgctctattcaggac

SEQ ID NO: 20044 - DNA, 122 bp, Homo sapiens
  misc_feature (61)..(62): /note="This region represents a CpG dinucleotide"
  misc_feature (61)..(61): /note="Nucleotide may be methylated to form 5-methylcytosine"
accttgtgatccgcccaccttggcctcccaaagtgctaggattacaggcgtgagccactgcgcccggccaaaagcatgaattttggagtcaagacaggccctggtcaaatcctggggcagtg

SEQ ID NO: 20045 - DNA, 122 bp, Homo sapiens
  misc_feature (61)..(62): /note="This region represents a CpG dinucleotide"
  misc_feature (61)..(61): /note="Nucleotide may be methylated to form 5-methylcytosine"
aaatcatcttatgcctttgaatacattccagcaccactgactctaccatgtattttctaacgtatgggttcccgccacccatgctctgggactgagttaataatggtacttacagggttgtt

SEQ ID NO: 20046 - DNA, 122 bp, Homo sapiens
  misc_feature (61)..(62): /note="This region represents a CpG dinucleotide"
  misc_feature (61)..(61): /note="Nucleotide may be methylated to form 5-methylcytosine"
tgtgcagagaatatccaatgaagtgagaaaaatatgcaaccctgtagctctcagtctagacgttagttatctaaatcacacactcatcctgtggcagctgccggggctgcgtccacttactt

SEQ ID NO: 20047 - DNA, 122 bp, Homo sapiens
  misc_feature (61)..(62): /note="This region represents a CpG dinucleotide"
  misc_feature (61)..(61): /note="Nucleotide may be methylated to form 5-methylcytosine"
gacttccactactcactgcatgaggattattctgtggaaaccagagtactaaggacgaggcgctggatgatttggtcaaagtcaaatgtgccaagtcagcatcgagcagctatttttgcctt

SEQ ID NO: 20048 - DNA, 122 bp, Homo sapiens
  misc_feature (61)..(62): /note="This region represents a CpG dinucleotide"
  misc_feature (61)..(61): /note="Nucleotide may be methylated to form 5-methylcytosine"
acaagcctgttggtccaagctgagaaggcatcaggaagtgtttatgggaaggagttccaacggcaccctcttgagctggccgttgatactgacctccttatgtttgcacagatggaactact

SEQ ID NO: 20049 - DNA, 122 bp, Homo sapiens
  misc_feature (61)..(62): /note="This region represents a CpG dinucleotide"
  misc_feature (61)..(61): /note="Nucleotide may be methylated to form 5-methylcytosine"
ggggtgctttgaagataatctctacctgtctaccctgaatgcaactaaagcattttacagcggtttgccattagggtattcatgcagataatgctttctactaggaattacaaactttaaac

SEQ ID NO: 20050 - DNA, 122 bp, Homo sapiens
  misc_feature (61)..(62): /note="This region represents a CpG dinucleotide"
  misc_feature (61)..(61): /note="Nucleotide may be methylated to form 5-methylcytosine"
cgccaagatgcacccatttattaaatccttctccaagatacacctgtttattaaaccttccgccaagatacacccatttatgaaacccttcgccatgatgcacctgtttattaaacccttcc

SEQ ID NO: 20051 - DNA, 122 bp, Homo sapiens
  misc_feature (61)..(62): /note="This region represents a CpG dinucleotide"
  misc_feature (61)..(61): /note="Nucleotide may be methylated to form 5-methylcytosine"
ggtgttgctggttttgccagcactgatacacactttaagcagcaagggtcaacagtggatcgtgtggaacgagtcctggcctggggggaaggatttgtttttcaaacatcccagttctatgc

SEQ ID NO: 20052 - DNA, 122 bp, Homo sapiens
  misc_feature (61)..(62): /note="This region represents a CpG dinucleotide"
  misc_feature (61)..(61): /note="Nucleotide may be methylated to form 5-methylcytosine"
aagcttaggttcaaatcttggctctgacactctgtgacctatcaattcactgggacttagcgatttttttttctacttttttcagtcttattaaggtatgattgacaaatttgattggcata

SEQ ID NO: 20053 - DNA, 122 bp, Homo sapiens
  misc_feature (61)..(62): /note="This region represents a CpG dinucleotide"
  misc_feature (61)..(61): /note="Nucleotide may be methylated to form 5-methylcytosine"
tgcatttaagtttcctttatgtattgccttatacagatgtaccacagatcttgaccacctcgcttcaaatcctgttttggctaagtgatgcaatcttgtgctgtttacttaacctctcacca

SEQ ID NO: 20054 - DNA, 122 bp, Homo sapiens
  misc_feature (61)..(62): /note="This region represents a CpG dinucleotide"
  misc_feature (61)..(61): /note="Nucleotide may be methylated to form 5-methylcytosine"
tctgtttcatttcctctggtattgattctgtctgtaatccagaccagttagaagagataacgtgaacaaaggtgctctgcaaaatgtgctcaggaattgtgctttgaagttcagacactctg

SEQ ID NO: 20055 - DNA, 122 bp, Homo sapiens
  misc_feature (61)..(62): /note="This region represents a CpG dinucleotide"
  misc_feature (61)..(61): /note="Nucleotide may be methylated to form 5-methylcytosine"
tgtcatgagcaaatggatggatactgaggccactgcaagagggaaagagaaactatcaggcggggacacaggttttcagtatgtttttgcaaatgagcactttgccaaagtcaaaaacaaga

SEQ ID NO: 20056 - DNA, 122 bp, Homo sapiens
  misc_feature (61)..(62): /note="This region represents a CpG dinucleotide"
  misc_feature (61)..(61): /note="Nucleotide may be methylated to form 5-methylcytosine"
agcatgggtagcctgagaaagcttccaccttttgatgacagggcccaaccccagacttcacggcctgtcactctttgaggactctatagagggctccataagaaccagggctgctgagtgag

SEQ ID NO: 20057 - DNA, 122 bp, Homo sapiens
  misc_feature (61)..(62): /note="This region represents a CpG dinucleotide"
  misc_feature (61)..(61): /note="Nucleotide may be methylated to form 5-methylcytosine"
attgtctttcccaggatgactggcactgactcagtcaccatcagcagctcttacatagcacgtgctagatcacaaagtccagagacaagggcctgtggcacgatgatgttcaataacataca

SEQ ID NO: 20058 - DNA, 122 bp, Homo sapiens
  misc_feature (61)..(62): /note="This region represents a CpG dinucleotide"
  misc_feature (61)..(61): /note="Nucleotide may be methylated to form 5-methylcytosine"
cacacctcatgtgtggaccacatcattcagcaaagcttccttaactgtgagctattagagcgctactattttttttttcaggctctgaatagttctagggatctcaccaggggttggaggaa

SEQ ID NO: 20059 - DNA, 122 bp, Homo sapiens
  misc_feature (61)..(62): /note="This region represents a CpG dinucleotide"
  misc_feature (61)..(61): /note="Nucleotide may be methylated to form 5-methylcytosine"
ggaaaagcaagtaagatcctttacaacttaattcatataaaaacccaagttcgggccaggcgcagtggctcatgcctgtaatcctagcactttgggaggccgaggcgggtggatcacttgag

SEQ ID NO: 20060 - DNA, 122 bp, Homo sapiens
  misc_feature (61)..(62): /note="This region represents a CpG dinucleotide"
  misc_feature (61)..(61): /note="Nucleotide may be methylated to form 5-methylcytosine"
gactacagccaacaataaatattaatactataaagtaaggtcctaaggactccacagttacggaggaataagggatcagaagttcatatccattatttggaagcattaagaaatgtttagat

SEQ ID NO: 20061 - DNA, 122 bp, Homo sapiens
  misc_feature (61)..(62): /note="This region represents a CpG dinucleotide"
  misc_feature (61)..(61): /note="Nucleotide may be methylated to form 5-methylcytosine"
acttgctccactgggcccctgcagggatgctgtggtcctcccactggcaggcttcagcttcggccttgccatatgccccaacacaaccctccagttgccccaggggctatattggctggtca

SEQ ID NO: 20062 - DNA, 122 bp, Homo sapiens
  misc_feature (61)..(62): /note="This region represents a CpG dinucleotide"
  misc_feature (61)..(61): /note="Nucleotide may be methylated to form 5-methylcytosine"
ccaggcactctacatacatcatctttaatcctcttggccactccctgcagatattactaacgcaaaaaggttaggaacttgccaaggtcagaaagctggtaaatggtacagctcagacataa

SEQ ID NO: 20063 - DNA, 122 bp, Homo sapiens
  misc_feature (61)..(62): /note="This region represents a CpG dinucleotide"
  misc_feature (61)..(61): /note="Nucleotide may be methylated to form 5-methylcytosine"
tgctgccacctccaagccccacccatcccctctgcccttggttccacacccccagctacacgctgacaaagatgctgggctagagacacccagctcgccagacacacccaggatgctctcac

SEQ ID NO: 20064 - DNA, 122 bp, Homo sapiens
  misc_feature (61)..(62): /note="This region represents a CpG dinucleotide"
  misc_feature (61)..(61): /note="Nucleotide may be methylated to form 5-methylcytosine"
gagcttgtggtttacactctatctctgtgagcacccaaggccaaagcaggctgcccaagacggagaagagaagaacaccccatggcccagcagttcaagccacccagggcagccacctccat

SEQ ID NO: 20065 - DNA, 122 bp, Homo sapiens
  misc_feature (61)..(62): /note="This region represents a CpG dinucleotide"
  misc_feature (61)..(61): /note="Nucleotide may be methylated to form 5-methylcytosine"
gttgagctttctagcccgaactttctaaatgtgatcctgatgacctttgccagtgaagtacggtggtgaatcagtgatgtgattgtggtacagaccatcggtctgggctgcacctgttgtga

SEQ ID NO: 20066 - DNA, 122 bp, Homo sapiens
  misc_feature (61)..(62): /note="This region represents a CpG dinucleotide"
  misc_feature (61)..(61): /note="Nucleotide may be methylated to form 5-methylcytosine"
tcattatttctgagctctgagtcctgtggtcccatcagtcctgcttcctcccttctgccccgcagtgctggcctctcccagctggccagttgtttatgaagaaccccagcggagtctccctg

SEQ ID NO: 20067 - DNA, 122 bp, Homo sapiens
  misc_feature (61)..(62): /note="This region represents a CpG dinucleotide"
  misc_feature (61)..(61): /note="Nucleotide may be methylated to form 5-methylcytosine"
tgcagggtgcagagattcaaacacagtgctgggaccactctcttctggatttgactcatgcgtgagaggaataaacctatacattttacttagccacctgcttttcggaatttgtgggcaag

SEQ ID NO: 20068 - DNA, 122 bp, Homo sapiens
  misc_feature (61)..(62): /note="This region represents a CpG dinucleotide"
  misc_feature (61)..(61): /note="Nucleotide may be methylated to form 5-methylcytosine"
ctggatcttcctgctaaatttctggctggtctacaggcctgctgctggctccagccagatcgtaaccacagtctagctgtgatgttggtcttccccatttgtttggcactaggccccagtcc

SEQ ID NO: 20069 - DNA, 122 bp, Homo sapiens
  misc_feature (61)..(62): /note="This region represents a CpG dinucleotide"
  misc_feature (61)..(61): /note="Nucleotide may be methylated to form 5-methylcytosine"
tctcctgtatgacttcatttttcccttatggttccttttttaaagtagttgcataaacagcggccagataagcatgtttgaagtagaaattcaggggaaaacaaagcctacactgaatgggc

SEQ ID NO: 20070 - DNA, 122 bp, Homo sapiens
  misc_feature (61)..(62): /note="This region represents a CpG dinucleotide"
  misc_feature (61)..(61): /note="Nucleotide may be methylated to form 5-methylcytosine"
tatgaccctcattggcttaagactgtattgccttaagactacctgaagtcattatgcccacgtgacctaaggggtggaagtcccattatcctcacaggtgtagaatgggatcagatcaagtc

SEQ ID NO: 20071 - DNA, 122 bp, Homo sapiens
  misc_feature (61)..(62): /note="This region represents a CpG dinucleotide"
  misc_feature (61)..(61): /note="Nucleotide may be methylated to form 5-methylcytosine"
acaatggatttatgtaaagcatcacttaaccaaagttttcatggtcaatgccagctctttcgggtccaaggtgattaggacacacctgtatgaagtacagtctggcagccacagagaggaag

SEQ ID NO: 20072 - DNA, 122 bp, Homo sapiens
  misc_feature (61)..(62): /note="This region represents a CpG dinucleotide"
  misc_feature (61)..(61): /note="Nucleotide may be methylated to form 5-methylcytosine"
ccgccgtccctgtgtgcgtgtctgtgtcccaatcttcttctcttgtaaaagaaacgagtccggctggattagggcccacctccatgccctcatttttcattaattacctctttaaggcccta

SEQ ID NO: 20073 - DNA, 122 bp, Homo sapiens
  misc_feature (61)..(62): /note="This region represents a CpG dinucleotide"
  misc_feature (61)..(61): /note="Nucleotide may be methylated to form 5-methylcytosine"
ggaactactggggggcgggaggagctgagaactacgcaaaagggctgacagaatgattggcggtatggagctgtcattcaaagggcctctacacatcatgagcactgatggtgaagcatgag

SEQ ID NO: 20074 - DNA, 122 bp, Homo sapiens
  misc_feature (61)..(62): /note="This region represents a CpG dinucleotide"
  misc_feature (61)..(61): /note="Nucleotide may be methylated to form 5-methylcytosine"
agagggtgaaactgagcacttccgtagggtgacagtggggccaggtggagccgttcagaccgagggaaaggctcgtgcagggacagtggggaatgaggctgtcctcaaagggggcagatgat

SEQ ID NO: 20075 - DNA, 122 bp, Homo sapiens
  misc_feature (61)..(62): /note="This region represents a CpG dinucleotide"
  misc_feature (61)..(61): /note="Nucleotide may be methylated to form 5-methylcytosine"
gcagccccccaagcttctacagcccttcgtacttattgggtagaaagcagggggaggaaacgattggccagctgcttgattgttcacacgttcacgttattgctaacaggtttcagatttgc

SEQ ID NO: 20076 - DNA, 122 bp, Homo sapiens
  misc_feature (61)..(62): /note="This region represents a CpG dinucleotide"
  misc_feature (61)..(61): /note="Nucleotide may be methylated to form 5-methylcytosine"
ttcaattctcttacactgctatgctgaacttcttcagcacagactgtgggaagtgagccacggagccactgaattaattgccattgctcccagcacgcctggtagtctggcagcagacaaaa

SEQ ID NO: 20077 - DNA, 122 bp, Homo sapiens
  misc_feature (61)..(62): /note="This region represents a CpG dinucleotide"
  misc_feature (61)..(61): /note="Nucleotide may be methylated to form 5-methylcytosine"
gcaggcagcagcaggccaagggggccagagggagggtgttcctgaatgcctctttcttcccgctccttcaggctgtcttctgaagtagccaggctatcagggttttgcaacaatgcaacaaa

SEQ ID NO: 20078 - DNA, 122 bp, Homo sapiens
  misc_feature (61)..(62): /note="This region represents a CpG dinucleotide"
  misc_feature (61)..(61): /note="Nucleotide may be methylated to form 5-methylcytosine"
gtaacatctgccatttataaaatttctgtagagttaatagaacttttcctgaagggaggccggcaatatgcatcatgaattcaagcactaccagtgaagttgtggagtttgaagtggtactc

SEQ ID NO: 20079 - DNA, 122 bp, Homo sapiens
  misc_feature (61)..(62): /note="This region represents a CpG dinucleotide"
  misc_feature (61)..(61): /note="Nucleotide may be methylated to form 5-methylcytosine"
ccccactgccttctgcaacatctcatgtacacgctgggcttctttcctgcgctgattagacggggggtgagccaatgagtgaggggtaagggtgaacctacctctgcacactgatttgtatc

SEQ ID NO: 20080 - DNA, 122 bp, Homo sapiens
  misc_feature (61)..(62): /note="This region represents a CpG dinucleotide"
  misc_feature (61)..(61): /note="Nucleotide may be methylated to form 5-methylcytosine"
cagtgaagaagccctttgttgaccagagagaaaggggctgcagtggccaacccttcccttcggactcagcacttccttgcttagtctgaaaggtcttcagtgctttgtcccctttccttgaa

SEQ ID NO: 20081 - DNA, 122 bp, Homo sapiens
  misc_feature (61)..(62): /note="This region represents a CpG dinucleotide"
  misc_feature (61)..(61): /note="Nucleotide may be methylated to form 5-methylcytosine"
tctgctctcttaagaacagttcatgaactgcatctgcccttcagagataactgaaacacacgtgagagccacacccagcccagaatggcagaagaaaaaagtcctaaaggagccaagacttt

SEQ ID NO: 20082 - DNA, 122 bp, Homo sapiens
  misc_feature (61)..(62): /note="This region represents a CpG dinucleotide"
  misc_feature (61)..(61): /note="Nucleotide may be methylated to form 5-methylcytosine"
cgattgtcttgcctcagcctctttagtagctggaacaacaggcacgtgccagcatgatttcgccatgttgcccaggctggtctcgtgacctcaagtgatctctctgccttgagctcccaaag

SEQ ID NO: 20083 - DNA, 122 bp, Homo sapiens
  misc_feature (61)..(62): /note="This region represents a CpG dinucleotide"
  misc_feature (61)..(61): /note="Nucleotide may be methylated to form 5-methylcytosine"
ccagtatgctaaatgaaataagctagtcacgaaaggacaaatatattgattctactcatacgcaatatctgaagtagtcaaaatcatagaaacagaaagcagaagcgtggttgccaagggct

SEQ ID NO: 20084 - DNA, 122 bp, Homo sapiens
  misc_feature (61)..(62): /note="This region represents a CpG dinucleotide"
  misc_feature (61)..(61): /note="Nucleotide may be methylated to form 5-methylcytosine"
gtttcagttctttttctttcttctaactccctccattttgaggtgcaatgggcaatgcagcgtgcagaatggaagaggaagtgaagaatgtcatgtgaatactaaagagaattcatgatcag

SEQ ID NO: 20085 - DNA, 122 bp, Homo sapiens
  misc_feature (61)..(62): /note="This region represents a CpG dinucleotide"
  misc_feature (61)..(61): /note="Nucleotide may be methylated to form 5-methylcytosine"
acttgagagagttgcaatctgccactggacatgctccatcaagtggaacaggcactggagcgacacagccagttgcagggactaaacaaaatcaggggcaggttccacatggaaatctgggc

SEQ ID NO: 20086 - DNA, 122 bp, Homo sapiens
  misc_feature (61)..(62): /note="This region represents a CpG dinucleotide"
  misc_feature (61)..(61): /note="Nucleotide may be methylated to form 5-methylcytosine"
cgtgatccacctgcctccgcctcccaaagtgctgggattacaggtgtgagccaccacgcccggcctaggtttcacctttgaacccagtggagagctctgttcccaagctgtaccctcttcta

SEQ ID NO: 20087 - DNA, 122 bp, Homo sapiens
  misc_feature (61)..(62): /note="This region represents a CpG dinucleotide"
  misc_feature (61)..(61): /note="Nucleotide may be methylated to form 5-methylcytosine"
gaggctctcgctgaaaccagtcccaggctccacagagtcagatcacggcttcacaccagtcgttctggtcacttaggcgttcgcgtgagcgctcaaccccttaccgccacctcatcgtcact

SEQ ID NO: 20088 - DNA, 122 bp, Homo sapiens
  misc_feature (61)..(62): /note="This region represents a CpG dinucleotide"
  misc_feature (61)..(61): /note="Nucleotide may be methylated to form 5-methylcytosine"
gaacattgctcaagatctgcaaagcagctgtgatgtgtgcggggtgtactggaagttgaacgggactcctcaagcagcctaatgagttgggattgaggattgcatacacaagggaactcgca

SEQ ID NO: 20089 - DNA, 122 bp, Homo sapiens
  misc_feature (61)..(62): /note="This region represents a CpG dinucleotide"
  misc_feature (61)..(61): /note="Nucleotide may be methylated to form 5-methylcytosine"
cctctttctttccaaatcaaattgacccacagttcagcagccctctgttgccaggactgacgtgatggtagcttatctttgtcagtgaaaagaaagtttgctgcatgccttcatgccactcc

SEQ ID NO: 20090 - DNA, 122 bp, Homo sapiens
  misc_feature (61)..(62): /note="This region represents a CpG dinucleotide"
  misc_feature (61)..(61): /note="Nucleotide may be methylated to form 5-methylcytosine"
gggacagaggtgaatatggcacactctctgttcccaaggagccaagtcagccaggggagacggaaaaggacagccttgtgtgaccagtgctgggaccccagccacgcacaggggctgcagaa

SEQ ID NO: 20091 - DNA, 122 bp, Homo sapiens
  misc_feature (61)..(62): /note="This region represents a CpG dinucleotide"
  misc_feature (61)..(61): /note="Nucleotide may be methylated to form 5-methylcytosine"
aagttaaaagaataacaatacgatacgggacaggccaggttctttctgttccagaacccacgtgtcaaagaagaggccatatgtatctctacaacatgaatgttgctatccattcatcaaat

SEQ ID NO: 20092 - DNA, 122 bp, Homo sapiens
  misc_feature (61)..(62): /note="This region represents a CpG dinucleotide"
  misc_feature (61)..(61): /note="Nucleotide may be methylated to form 5-methylcytosine"
ttcagctgggcttatggggcacggagtgacaaaagtgctaagttacctccgatgaggcaacgtgtgggcctttgtatccattagtgaccattcatttgatggtgcctgacctcagggaaggg

SEQ ID NO: 20093 - DNA, 122 bp, Homo sapiens
  misc_feature (61)..(62): /note="This region represents a CpG dinucleotide"
  misc_feature (61)..(61): /note="Nucleotide may be methylated to form 5-methylcytosine"
ctttggtgaaggaagacagcacccggtgaagggctcagaggtattagtgtggctgagattcgacacccactctgccatcctctgctctcctctagaggaagttgcctcttggggagctgagt

SEQ ID NO: 20094 - DNA, 122 bp, Homo sapiens
  misc_feature (61)..(62): /note="This region represents a CpG dinucleotide"
  misc_feature (61)..(61): /note="Nucleotide may be methylated to form 5-methylcytosine"
cttcacagaacccgtcataaggcactagaggacagagctcagcagggcttcacagctcggcgtgtctgtgccctgcttgcctagcaagttgaaagcatgtgataagctgaaaggatgcagac

SEQ ID NO: 20095 - DNA, 122 bp, Homo sapiens
  misc_feature (61)..(62): /note="This region represents a CpG dinucleotide"
  misc_feature (61)..(61): /note="Nucleotide may be methylated to form 5-methylcytosine"
gctctcactcacaggtagatgttttttattgccccattcacaattcagccacctgctgtccgcatgcatgtgcttgccatgtttagatattgggtgtttttccagtttacttaataagttag

SEQ ID NO: 20096 - DNA, 122 bp, Homo sapiens
  misc_feature (61)..(62): /note="This region represents a CpG dinucleotide"
  misc_feature (61)..(61): /note="Nucleotide may be methylated to form 5-methylcytosine"
gcaagcagtgttatggctcatgtgtcaccttttacccacaggagttgatgatgtggttcccggtatgccaagtaactaggagggaggaggtcagcactggggaggggaaggtaacatcctca

SEQ ID NO: 20097 - DNA, 122 bp, Homo sapiens
  misc_feature (61)..(62): /note="This region represents a CpG dinucleotide"
  misc_feature (61)..(61): /note="Nucleotide may be methylated to form 5-methylcytosine"
cacccctgtggctctaggaatcagccatacaatcgacttactgctcagatcattagctgacgagaccccaatgactcatcacatctgttggttaattgagagtgagaggactggagcacaca

SEQ ID NO: 20098 - DNA, 122 bp, Homo sapiens
  misc_feature (61)..(62): /note="This region represents a CpG dinucleotide"
  misc_feature (61)..(61): /note="Nucleotide may be methylated to form 5-methylcytosine"
ttttgcccagtttttactgcagaagtgaaataacctgacacaatctttgggagctacaggcgagcagacatccaccaggattaggaccagagagaagaactctaccaactccaaaaggaaac

SEQ ID NO: 20099 - DNA, 122 bp, Homo sapiens
  misc_feature (61)..(62): /note="This region represents a CpG dinucleotide"
  misc_feature (61)..(61): /note="Nucleotide may be methylated to form 5-methylcytosine"
atgcttaacaatcaataattccatcaccaggcagtatgaggctgggagttatgcaacaggcggaacagggcattactgctacatcattcaggagactccaaatatctgttgtgctcagaacc

SEQ ID NO: 20100 - DNA, 122 bp, Homo sapiens
  misc_feature (61)..(62): /note="This region represents a CpG dinucleotide"
  misc_feature (61)..(61): /note="Nucleotide may be methylated to form 5-methylcytosine"
ttcctagatttattccagttaagcatttataggcatttatctgtgtgtctgatgccctgacgtttttgctgtaggtaagaagtgatggagtgagctgagctgccaggcttcctggagtgatt

SEQ ID NO: 20101 - DNA, 122 bp, Homo sapiens
  misc_feature (61)..(62): /note="This region represents a CpG dinucleotide"
  misc_feature (61)..(61): /note="Nucleotide may be methylated to form 5-methylcytosine"
tttttcagattttcacctgcaaaattaagttatcactttcctcagaatcagttcatgtatcgtataaagttgtatttgatgtttttttctctgttaaataaaagaggaatgttgaaatacag

SEQ ID NO: 20102 - DNA, 122 bp, Homo sapiens
  misc_feature (61)..(62): /note="This region represents a CpG dinucleotide"
  misc_feature (61)..(61): /note="Nucleotide may be methylated to form 5-methylcytosine"
caaatctatatgaaggatcgaattgcattgaactagcaaacacacacacacacacgcacacgcaaaaactgatgaaagctgaacaaggtctgtagtctagtcaacagtactgcactatgtga

SEQ ID NO: 20103 - DNA, 122 bp, Homo sapiens
  misc_feature (61)..(62): /note="This region represents a CpG dinucleotide"
  misc_feature (61)..(61): /note="Nucleotide may be methylated to form 5-methylcytosine"
ttaagcctagcacagagcctggcacaaagtaattgacaaatgtgggaaggactgaacgcacggacgatgcacagcaacatatgcagatgctgatgggaagcaaaactcaggcagaaaaaccg

SEQ ID NO: 20104 - DNA, 122 bp, Homo sapiens
  misc_feature (61)..(62): /note="This region represents a CpG dinucleotide"
  misc_feature (61)..(61): /note="Nucleotide may be methylated to form 5-methylcytosine"
ctgtaagatgggcgaggccaaggaagagtcatttcctccatggtgaagaacataatgctacgcaacttcaagcaaattaaaaaacagttgtggttggccaggcatggtggctcacacctgta

SEQ ID NO: 20105 - DNA, 122 bp, Homo sapiens
  misc_feature (61)..(62): /note="This region represents a CpG dinucleotide"
  misc_feature (61)..(61): /note="Nucleotide may be methylated to form 5-methylcytosine"
caggtgcttagtgaggcaggcctcacggtgggaggcctcggggatgcagctgtgctagtgcgtggaagggcgagtctgcctgatcctgggatgcagtgttagaaagcacacggttactgtgt

SEQ ID NO: 20106 - DNA, 122 bp, Homo sapiens
  misc_feature (61)..(62): /note="This region represents a CpG dinucleotide"
  misc_feature (61)..(61): /note="Nucleotide may be methylated to form 5-methylcytosine"
atgtgaattgaattctgactcatcacaaactggtcaactatttctaagatctcctttcttcgtatagtatcacccactggtggctggtttaagtacaacaaaagaaatgtttctactgatat

SEQ ID NO: 20107 - DNA, 122 bp, Homo sapiens
  misc_feature (61)..(62): /note="This region represents a CpG dinucleotide"
  misc_feature (61)..(61): /note="Nucleotide may be methylated to form 5-methylcytosine"
tacttatgttcttacattgactggttactcaccagctcttcagaacaattgtggctgaaacgtggcagctggcagacttctacgtatatgaagttaatccatggggcataagagcacagtgg

SEQ ID NO: 20108 - DNA, 122 bp, Homo sapiens
  misc_feature (61)..(62): /note="This region represents a CpG dinucleotide"
  misc_feature (61)..(61): /note="Nucleotide may be methylated to form 5-methylcytosine"
attattttcagtgtactactggactccaaatacagacatcatgagatgtccacttgcccacgtgtggacacacaggcaggagcggcccagatcctcccttgtctgtggcctggtctttccat

SEQ ID NO: 20109 - DNA, 122 bp, Homo sapiens
  misc_feature (61)..(62): /note="This region represents a CpG dinucleotide"
  misc_feature (61)..(61): /note="Nucleotide may be methylated to form 5-methylcytosine"
tatttgacccctagctctcccttggaaataccaagcctggaactctggagaaggcgccgccgctcgtgtagttctgaaaggctctctttgtcctgaggaatgcctgttgcaatgaagcttgg

SEQ ID NO: 20110 - DNA, 122 bp, Homo sapiens
  misc_feature (61)..(62): /note="This region represents a CpG dinucleotide"
  misc_feature (61)..(61): /note="Nucleotide may be methylated to form 5-methylcytosine"
cccagaaagtgactcagtgcaagaggacagttttgactccttacgatttcatctctgacccgaccaattatcactcctgactcagtggtcccctacccaccaaattatccttaaaaacacca

SEQ ID NO: 20111 - DNA, 122 bp, Homo sapiens
  misc_feature (61)..(62): /note="This region represents a CpG dinucleotide"
  misc_feature (61)..(61): /note="Nucleotide may be methylated to form 5-methylcytosine"
ggtcactgattctggcaggtcagtgacttgaacacagtgggaagttgcctcattcatctccgtgcagcatctgccactgctcagagggggcatgtggtggctctgagattccactggcttat

SEQ ID NO: 20112 - DNA, 122 bp, Homo sapiens
  misc_feature (61)..(62): /note="This region represents a CpG dinucleotide"
  misc_feature (61)..(61): /note="Nucleotide may be methylated to form 5-methylcytosine"
caacacagagcaaaggatcaactgagagagaaagaaagaatttcctgggtaacaggcggccgctgcaggcacttgctgcgtgtgtattgacagagggaacacttgccttctgctccacactc

SEQ ID NO: 20113 - DNA, 122 bp, Homo sapiens
  misc_feature (61)..(62): /note="This region represents a CpG dinucleotide"
  misc_feature (61)..(61): /note="Nucleotide may be methylated to form 5-methylcytosine"
caaactcctgacctcaggtgatccacccaccttgacttcttaaagtgcttggattacaggcgtgagcctccatgccccaccaattgtcttggctttatagttaggagtggaattgctgagtc

SEQ ID NO: 20114 - DNA, 122 bp, Homo sapiens
  misc_feature (61)..(62): /note="This region represents a CpG dinucleotide"
  misc_feature (61)..(61): /note="Nucleotide may be methylated to form 5-methylcytosine"
ttcaatccccgaccttctgggctactataaagcagaatgctccttgactttcatgtgacccgtcacctgcctgagtgatagttgcaggaaatcaggctctagttgcacaagtctttgtggct

SEQ ID NO: 20115 - DNA, 122 bp, Homo sapiens
  misc_feature (61)..(62): /note="This region represents a CpG dinucleotide"
  misc_feature (61)..(61): /note="Nucleotide may be methylated to form 5-methylcytosine"
gtggtgcgcgcctataatcccagctactccagaggctgaggcaggagaattgttggatcccgggaggaagaggtttcattgagctgagatctcattactgtacactccagcctgggtgacag

SEQ ID NO: 20116 - DNA, 122 bp, Homo sapiens
  misc_feature (61)..(62): /note="This region represents a CpG dinucleotide"
  misc_feature (61)..(61): /note="Nucleotide may be methylated to form 5-methylcytosine"
ctcatagtttatttacttaggaccaacacggagctggtaaacgacgtatagcatcttgcacgtgctatttatttcctgtctcttctagagcctggcactgtgccacacatcttcacagacaa

SEQ ID NO: 20117 - DNA, 122 bp, Homo sapiens
  misc_feature (61)..(62): /note="This region represents a CpG dinucleotide"
  misc_feature (61)..(61): /note="Nucleotide may be methylated to form 5-methylcytosine"
ctctgtgatgttcacacaatgatgaaattgcctaatgatgcactgctcaggatgtatccccgtcattaagcaacgatgactgtatttcccattatccttgtcagtgcttggtaataccataa

SEQ ID NO: 20118 - DNA, 122 bp, Homo sapiens
  misc_feature (61)..(62): /note="This region represents a CpG dinucleotide"
  misc_feature (61)..(61): /note="Nucleotide may be methylated to form 5-methylcytosine"
cctttaatgcaatcagaggttatgtttgtttagaaagctaacatctatccagattatacacgctcaccagtgtcaggccaaaaaacacaggcccaaaaccactcattccataactccctcat

SEQ ID NO: 20119 - DNA, 122 bp, Homo sapiens
  misc_feature (61)..(62): /note="This region represents a CpG dinucleotide"
  misc_feature (61)..(61): /note="Nucleotide may be methylated to form 5-methylcytosine"
tttcttagaagggaggttctttaagaataacatgaaattatcatcttaactttataatgccgaaagtatttgataaatacaatgttttggttatgagatctaatcagactttgacggctaat

SEQ ID NO: 20120 - DNA, 122 bp, Homo sapiens
  misc_feature (61)..(62): /note="This region represents a CpG dinucleotide"
  misc_feature (61)..(61): /note="Nucleotide may be methylated to form 5-methylcytosine"
tttatgaaagtctgtcataaaatgcaggtaaccacagacacattctgtgttgttccaaagcgtagaacatagacccaatgggaggacatcccagggatgcggatttggcctcaacctattaa

SEQ ID NO: 20121 - DNA, 122 bp, Homo sapiens
  misc_feature (61)..(62): /note="This region represents a CpG dinucleotide"
  misc_feature (61)..(61): /note="Nucleotide may be methylated to form 5-methylcytosine"
gcagtaaacaccctggaaacgtgccctggagccacaccggccctcacagcccaggaggcccgcagcagtgccgcctctcagctggcctgctcctcaccgggggctggccctgccctgataac

SEQ ID NO: 20122 - DNA, 122 bp, Homo sapiens
  misc_feature (61)..(62): /note="This region represents a CpG dinucleotide"
  misc_feature (61)..(61): /note="Nucleotide may be methylated to form 5-methylcytosine"
cctgcagattgtgaaggcgctgtactacctgaaggagaagcacggtgtcatccaccgcgacgtcaagccctccaacatcctgctggacgagcggggccagatcaagctctgcgacttcggca

SEQ ID NO: 20123 - DNA, 122 bp, Homo sapiens
  misc_feature (61)..(62): /note="This region represents a CpG dinucleotide"
  misc_feature (61)..(61): /note="Nucleotide may be methylated to form 5-methylcytosine"
tgggtggtccagggtgcaggagcctgattcagagacttatagatgagcctcacaataaggcgggggtccatacttagagcatttttactctaagttttctcccatctcctgagagaggactc

SEQ ID NO: 20124 - DNA, 122 bp, Homo sapiens
  misc_feature (61)..(62): /note="This region represents a CpG dinucleotide"
  misc_feature (61)..(61): /note="Nucleotide may be methylated to form 5-methylcytosine"
ctggctcagccaggcgtgtgacctcagataagtcacttcaatcccttccagctctgctagcgcaaacaagtccctcctaccttgcaggctggagcccagaaacttttcccatcagaacacgc

SEQ ID NO: 20125 - DNA, 122 bp, Homo sapiens
  misc_feature (61)..(62): /note="This region represents a CpG dinucleotide"
  misc_feature (61)..(61): /note="Nucleotide may be methylated to form 5-methylcytosine"
atgttgagatactgactccatagcatgggtggaccctgtaagcatctctttgaaggcagccgtccaaggacgggcgcctgagtcacggaagctttgctgggctggtagctggcaggaggcac

SEQ ID NO: 20126 - DNA, 122 bp, Homo sapiens
  misc_feature (61)..(62): /note="This region represents a CpG dinucleotide"
  misc_feature (61)..(61): /note="Nucleotide may be methylated to form 5-methylcytosine"
cagctgcggctgagacggaggtagccccccagaaccaagatctcctcggcagttgggtaccgcttcttcccagcccccgggactgcagcatcaactgtggctggagaggttggggtggctgg

SEQ ID NO: 20127 - DNA, 122 bp, Homo sapiens
  misc_feature (61)..(62): /note="This region represents a CpG dinucleotide"
  misc_feature (61)..(61): /note="Nucleotide may be methylated to form 5-methylcytosine"
ttccttctgccctgtaataataggctgcctggggctcactgggctatggtttaaaaagtccgcaggtggcttctcctctctccagctaggctggctggaaagggagggcaggattgtgtgtc

SEQ ID NO: 20128 - DNA, 122 bp, Homo sapiens
  misc_feature (61)..(62): /note="This region represents a CpG dinucleotide"
  misc_feature (61)..(61): /note="Nucleotide may be methylated to form 5-methylcytosine"
gttctagaatacccattgattgaaagagctgtggccaaacaggaaggacagagtaagagccgctgacaaaggattctgccaagacagaatcccagggtcacaggagagaggcttggggcagt

SEQ ID NO: 20129 - DNA, 122 bp, Homo sapiens
  misc_feature (61)..(62): /note="This region represents a CpG dinucleotide"
  misc_feature (61)..(61): /note="Nucleotide may be methylated to form 5-methylcytosine"
cttgtactacaggaaaacatttccacctagagtcctttcacagaatatctagagaccaaacgaaatcaaccataatgactaccagagccagatcataatcagtttttaattgaagtatcaag

SEQ ID NO: 20130 - DNA, 122 bp, Homo sapiens
  misc_feature (61)..(62): /note="This region represents a CpG dinucleotide"
  misc_feature (61)..(61): /note="Nucleotide may be methylated to form 5-methylcytosine"
ggctgacggtgacatggtatttaacttatttgtttcatgaccagctgatcctaacacagacgtcttatttttaggtggcgagtgctctaatcgctcctaagtgcctaaactggagccaccag

SEQ ID NO: 20131 - DNA, 122 bp, Homo sapiens
  misc_feature (61)..(62): /note="This region represents a CpG dinucleotide"
  misc_feature (61)..(61): /note="Nucleotide may be methylated to form 5-methylcytosine"
gcagcagcagctgtatgaagccggtgcgtcggctctgtgccctgcgtgagcccatgtgtgcggggcctttgtgttgcacttcactgagggccccggggtccactgggcacctgctgggctca

SEQ ID NO: 20132 - DNA, 122 bp, Homo sapiens
  misc_feature (61)..(62): /note="This region represents a CpG dinucleotide"
  misc_feature (61)..(61): /note="Nucleotide may be methylated to form 5-methylcytosine"
caaagacttagaaagtcccactgggctcacaagcaccctggcagggagggcagagagcggcgttaagaaaccacatggtgccattagatgctcttgacgtgctgtggttttctggttcactc

SEQ ID NO: 20133 - DNA, 122 bp, Homo sapiens
  misc_feature (61)..(62): /note="This region represents a CpG dinucleotide"
  misc_feature (61)..(61): /note="Nucleotide may be methylated to form 5-methylcytosine"
aggtagtaacttacatttaggaccctcaaactcattcgcctcatctacctttacaaagcacgtgtttatgctgtgtgaacaatgccagaataccacaactggactgcgtttatgtagcgagt

SEQ ID NO: 20134 - DNA, 122 bp, Homo sapiens
  misc_feature (61)..(62): /note="This region represents a CpG dinucleotide"
  misc_feature (61)..(61): /note="Nucleotide may be methylated to form 5-methylcytosine"
aaatgatgcataaactctggggcagtgaatggcttatttataaataagcgtcacttaaaacgacgaaggaagtccagatgacagcataaacagcagaaactcgggaactccttcaccctaaa

SEQ ID NO: 20135 - DNA, 122 bp, Homo sapiens
  misc_feature (61)..(62): /note="This region represents a CpG dinucleotide"
  misc_feature (61)..(61): /note="Nucleotide may be methylated to form 5-methylcytosine"
tgtaggtaaggaagaaggctaatctataatcagagagaccaagtttacagctgcctgtcacgtgactcaggtttcataagcacattcctttgaggctgaaagcaatttaaagttccaacagc

SEQ ID NO: 20136 - DNA, 122 bp, Homo sapiens
  misc_feature (61)..(62): /note="This region represents a CpG dinucleotide"
  misc_feature (61)..(61): /note="Nucleotide may be methylated to form 5-methylcytosine"
gctcctgcagtcacacttggcaccctcgtagctggtggtcaagtcatcaccggaattagtcgacccaggtgcatgcaggcaggggcaggtccagaggctgagctgggatgctggctcccaac

SEQ ID NO: 20137 - DNA, 122 bp, Homo sapiens
  misc_feature (61)..(62): /note="This region represents a CpG dinucleotide"
  misc_feature (61)..(61): /note="Nucleotide may be methylated to form 5-methylcytosine"
ataaggatatatgcccaggttagcctgctggaggaccaggctcctagatgagccaggggccgctgaccttagccaatggcagacatgtgagtgagcctgttggaccacaactgcccagccaa

SEQ ID NO: 20138 - DNA, 122 bp, Homo sapiens
  misc_feature (61)..(62): /note="This region represents a CpG dinucleotide"
  misc_feature (61)..(61): /note="Nucleotide may be methylated to form 5-methylcytosine"
gcataattagttaatgaatatattcattctttccaccatccctcattgatttgtctactgcgtcccagcagcagggaatgtgatggttgataagaacttgtttctgctctcatggtgatccc

SEQ ID NO: 20139 - DNA, 122 bp, Homo sapiens
  misc_feature (61)..(62): /note="This region represents a CpG dinucleotide"
  misc_feature (61)..(61): /note="Nucleotide may be methylated to form 5-methylcytosine"
atatgaatgagcagaggccaagttgtatttggctgcatgcttgattgcgtagaaaaatgacgacactacccttggtacatctattggccccaacaggaaggagatgaaagtattgcaaaggg

SEQ ID NO: 20140 - DNA, 122 bp, Homo sapiens
  misc_feature (61)..(62): /note="This region represents a CpG dinucleotide"
  misc_feature (61)..(61): /note="Nucleotide may be methylated to form 5-methylcytosine"
tcaggaatcagtcctggcttgtctgactgaactccctttgcattgccttctctgtcagaacgatcaatttgaattagagctttctcttttttattgccctgtctgaatttggcaccctgacc

SEQ ID NO: 20141 - DNA, 122 bp, Homo sapiens
  misc_feature (61)..(62): /note="This region represents a CpG dinucleotide"
  misc_feature (61)..(61): /note="Nucleotide may be methylated to form 5-methylcytosine"
ttagtggaaggaaatatcacccaaggactgcaatactataggtgcgtctgtgattagtcacggagcatatttgagtactgagacctaattgcaggcctaaggtcaaggaatacagggttgta

SEQ ID NO: 20142 - DNA, 122 bp, Homo sapiens
  misc_feature (61)..(62): /note="This region represents a CpG dinucleotide"
  misc_feature (61)..(61): /note="Nucleotide may be methylated to form 5-methylcytosine"
aaatgcacctcttgtcactaagggttgcaactgtcgccaagtgcttgtccatcagtgtcacgtaaagattttttaacctcacatatggcatcatgcagtttgtctgcctaaaaaggcaacct

SEQ ID NO: 20143 - DNA, 122 bp, Homo sapiens
  misc_feature (61)..(62): /note="This region represents a CpG dinucleotide"
  misc_feature (61)..(61): /note="Nucleotide may be methylated to form 5-methylcytosine"
tcgtcaccaaagtcaagaataccttcttctgcaccacattctcggagattttccaaatcccgggcattttcaggccttcactccctccactaataccccacagcttactcctcccaagtgaa

SEQ ID NO: 20144 - DNA, 122 bp, Homo sapiens
  misc_feature (61)..(62): /note="This region represents a CpG dinucleotide"
  misc_feature (61)..(61): /note="Nucleotide may be methylated to form 5-methylcytosine"
agagattttaaagcaggaatgaggctgagttctctgcggccggagcctcagttttcgactcgctacaaagttatgaacacactggcagccaagaagtatttatactcaccccatgccatcca

SEQ ID NO: 20145 - DNA, 122 bp, Homo sapiens
  misc_feature (61)..(62): /note="This region represents a CpG dinucleotide"
  misc_feature (61)..(61): /note="Nucleotide may be methylated to form 5-methylcytosine"
ctggaggcccagcaccccactcttgcacctgcaccagctctcctggcggggagcaggtcccgaggggccgagtgcacctggaggcccagcaccccagtcctctgcctgcaccagctctcctg

SEQ ID NO: 20146 - DNA, 122 bp, Homo sapiens
  misc_feature (61)..(62): /note="This region represents a CpG dinucleotide"
  misc_feature (61)..(61): /note="Nucleotide may be methylated to form 5-methylcytosine"
gactcatcatgaaaagacgtttcttcactgcttccttccagcccatttcgcaaagcagcacgcatgtttaatgcaacaatggtatcatccacactgttgctgttgctgtgtttatttccagc

SEQ ID NO: 20147 - DNA, 122 bp, Homo sapiens
  misc_feature (61)..(62): /note="This region represents a CpG dinucleotide"
  misc_feature (61)..(61): /note="Nucleotide may be methylated to form 5-methylcytosine"
caggaaccaggggtgccccaggccctgttttgttttgccaaatgagggacttaatgagtgcggccagttcagactttgctggccttggcacttagaaaaacttgctcggggccctgcctggg

SEQ ID NO: 20148 - DNA, 122 bp, Homo sapiens
  misc_feature (61)..(62): /note="This region represents a CpG dinucleotide"
  misc_feature (61)..(61): /note="Nucleotide may be methylated to form 5-methylcytosine"
gtgtttcttaattttcccaggggtgcccttggccctgatacagatttagctaccttcccccgaaagcctcaaagttctgcaaactcacagccaagcaaaacgcagctgcagtcgagccagcc

SEQ ID NO: 20149 - DNA, 122 bp, Homo sapiens
  misc_feature (61)..(62): /note="This region represents a CpG dinucleotide"
  misc_feature (61)..(61): /note="Nucleotide may be methylated to form 5-methylcytosine"
tggagtatgacttgagaggttaaatggtttgtttcaggtcacccaggaaaggtgaaagagcgaggaggggtgcccgattttcccctgcacacttcgcatgccataccctatctccactgcca

SEQ ID NO: 20150 - DNA, 122 bp, Homo sapiens
  misc_feature (61)..(62): /note="This region represents a CpG dinucleotide"
  misc_feature (61)..(61): /note="Nucleotide may be methylated to form 5-methylcytosine"
tggtgtctgggaacttggctttcaagacagtttccaccaccctgactgctaagggtaactcgtgatgcataaactacatgtgccaacaatacaatttatgctttctccctgaaactctggaa

SEQ ID NO: 20151 - DNA, 122 bp, Homo sapiens
  misc_feature (61)..(62): /note="This region represents a CpG dinucleotide"
  misc_feature (61)..(61): /note="Nucleotide may be methylated to form 5-methylcytosine"
tcctgttgcaggctcagaccaagtcccctggcacccacgcggctgcagcctcctcctgtgcgctgcagccacgctggccccaccctctgcagcctccaatcctgagcccctgagggaggatg

SEQ ID NO: 20152 - DNA, 122 bp, Homo sapiens
  misc_feature (61)..(62): /note="This region represents a CpG dinucleotide"
  misc_feature (61)..(61): /note="Nucleotide may be methylated to form 5-methylcytosine"
tctgtacaccatcttgcttaatctcacctctgtcctttgagataggacttgtcactaccacgtcacaagtcagaagctgaggctcggagcagtcacatggcttcttaaaggagacccaattt

SEQ ID NO: 20153 - DNA, 122 bp, Homo sapiens
  misc_feature (61)..(62): /note="This region represents a CpG dinucleotide"
  misc_feature (61)..(61): /note="Nucleotide may be methylated to form 5-methylcytosine"
aggccttgacctggccacagcagacaccatgggaggaatgtggattgttggttggggagacggacataagacacaaatcacaacatggtattgtgttatgcaatatgggcaagaatggagct

SEQ ID NO: 20154 - DNA, 122 bp, Homo sapiens
  misc_feature (61)..(62): /note="This region represents a CpG dinucleotide"
  misc_feature (61)..(61): /note="Nucleotide may be methylated to form 5-methylcytosine"
gactcatggtggagttttccaggctcgaggggactgttgacatttactctgctcctcccacgccacagagtctaactttttctatcttcccccaaacataactcattacctccagtttatcc

SEQ ID NO: 20155 - DNA, 122 bp, Homo sapiens
  misc_feature (61)..(62): /note="This region represents a CpG dinucleotide"
  misc_feature (61)..(61): /note="Nucleotide may be methylated to form 5-methylcytosine"
taggccatggatcatctctgcagagaatcctaccatgctgcattcttgctttaaacctttcgccctctaaaacaatgcccaagagccaatgttagtcatggtcttcctgtatttgctctagg

SEQ ID NO: 20156 - DNA, 122 bp, Homo sapiens
  misc_feature (61)..(62): /note="This region represents a CpG dinucleotide"
  misc_feature (61)..(61): /note="Nucleotide may be methylated to form 5-methylcytosine"
tatttggcggaaaaattgaaccaatgagtctctacactctacgactctggacacaatagacgacagtaggactaaggggaagtctgcactgtgacctgcaaaacatgtgcccctgtccaata

SEQ ID NO: 20157 - DNA, 122 bp, Homo sapiens
  misc_feature (61)..(62): /note="This region represents a CpG dinucleotide"
  misc_feature (61)..(61): /note="Nucleotide may be methylated to form 5-methylcytosine"
taaaaaaaaaatctgtttctctctttgcaaatcaacaacttttacctagaaactcttcagcggtgagctctgactgatcttgatctccggtccgttgcagaaaatataccattgtttacctg

SEQ ID NO: 20158 - DNA, 122 bp, Homo sapiens
  misc_feature (61)..(62): /note="This region represents a CpG dinucleotide"
  misc_feature (61)..(61): /note="Nucleotide may be methylated to form 5-methylcytosine"
caattaaaataaaattaaaagagatgccccacttaatattcctaccttatgcagagggaacggaggtccagagaaggaaagtagtatgtccagtttggaataatcagttagtgacagatcag

SEQ ID NO: 20159 - DNA, 122 bp, Homo sapiens
  misc_feature (61)..(62): /note="This region represents a CpG dinucleotide"
  misc_feature (61)..(61): /note="Nucleotide may be methylated to form 5-methylcytosine"
ctgttacaagagacctcctttggataaatctgaacacgctcccatggcagacctatggggcggtagacaagaggccagcagagctgtcccaggccctggtgacacctccatgcccaggtgaa

SEQ ID NO: 20160 - DNA, 122 bp, Homo sapiens
  misc_feature (61)..(62): /note="This region represents a CpG dinucleotide"
  misc_feature (61)..(61): /note="Nucleotide may be methylated to form 5-methylcytosine"
tttccccttgccaccagccttggtctctcctggcataggagccattccatggtttgtggtcgagttgactagaagacagctctgggtggccacctttgtttaggatgcatgaacttaaagcc

SEQ ID NO: 20161 - DNA, 122 bp, Homo sapiens
  misc_feature (61)..(62): /note="This region represents a CpG dinucleotide"
  misc_feature (61)..(61): /note="Nucleotide may be methylated to form 5-methylcytosine"
ggcctggattaagttttaatataaacaccagtggccttactgcccgcataaataggcctccggcctctcttcaacacctgtgtgctgctcccagcgctcatctctgttctgcccccagggta

SEQ ID NO: 20162 - DNA, 122 bp, Homo sapiens
  misc_feature (61)..(62): /note="This region represents a CpG dinucleotide"
  misc_feature (61)..(61): /note="Nucleotide may be methylated to form 5-methylcytosine"
atgaataaactaataaatggaggagaggagacaggtctttcttataaaagaatttcaattcgtatatgtagaagaaatagaggatagaaatcatcattgaagtaccacagttattgttgcag

SEQ ID NO: 20163 - DNA, 122 bp, Homo sapiens
  misc_feature (61)..(62): /note="This region represents a CpG dinucleotide"
  misc_feature (61)..(61): /note="Nucleotide may be methylated to form 5-methylcytosine"
atgctaattcccatgcatgtttggcaaacaggacaaggttagctgccctgcaggaagtcacgatctaataactgccaaaacagttcagggctatgtggtggctcccagtggtcccacctcct

SEQ ID NO: 20164 - DNA, 122 bp, Homo sapiens
  misc_feature (61)..(62): /note="This region represents a CpG dinucleotide"
  misc_feature (61)..(61): /note="Nucleotide may be methylated to form 5-methylcytosine"
cttgaattcctgtcctcaagaaatcctcccgcctctgccgcccagtgtcatgattaaaggcgtgagccaccacacccaactttcaactcccaacccgctccctggcactctctcaggctctg

SEQ ID NO: 20165 - DNA, 122 bp, Homo sapiens
  misc_feature (61)..(62): /note="This region represents a CpG dinucleotide"
  misc_feature (61)..(61): /note="Nucleotide may be methylated to form 5-methylcytosine"
cccacagtgagtctggtttctgagttgtcccggtctagccactttcgtttcccctggggccgggtggaggctggggcagaaagcggaactgagcccgcgtgttctgaggccagggcagggct

SEQ ID NO: 20166 - DNA, 122 bp, Homo sapiens
  misc_feature (61)..(62): /note="This region represents a CpG dinucleotide"
  misc_feature (61)..(61): /note="Nucleotide may be methylated to form 5-methylcytosine"
ttattaaccatcctgctgactcattctgtgacaaagcacctgaatcatgcattagcagaccgtctctgtcattgtgagagagccatttgcctcaaaataaagaatgtctgttaatattctgg

SEQ ID NO: 20167 - DNA, 122 bp, Homo sapiens
  misc_feature (61)..(62): /note="This region represents a CpG dinucleotide"
  misc_feature (61)..(61): /note="Nucleotide may be methylated to form 5-methylcytosine"
cctgtgatttttctcaagctgccaacacaggtacagaatgcagctttcttagcttggggacgtttaccttcctgtgatggtgttaagatagatgggttggaggaaccaaagttttatggcct

SEQ ID NO: 20168 - DNA, 122 bp, Homo sapiens
  misc_feature (61)..(62): /note="This region represents a CpG dinucleotide"
  misc_feature (61)..(61): /note="Nucleotide may be methylated to form 5-methylcytosine"
tcattaagggtacccggaatctgttttaatcgaggctggtaagacacacagacacggaaacgactgtcacgaaggaagaagttgatgatgtccacagatgcctaaaacaggaagcatggcac

SEQ ID NO: 20169 - DNA, 122 bp, Homo sapiens
  misc_feature (61)..(62): /note="This region represents a CpG dinucleotide"
  misc_feature (61)..(61): /note="Nucleotide may be methylated to form 5-methylcytosine"
gtgatattgggcaccttttcatatgctcattggcagtttccttctttcttcacctgtttacgtgtctgtccagtcacataaaagggggtggagaaaaggtggtgaagcggtgttgtttgtct

SEQ ID NO: 20170 - DNA, 122 bp, Homo sapiens
  misc_feature (61)..(62): /note="This region represents a CpG dinucleotide"
  misc_feature (61)..(61): /note="Nucleotide may be methylated to form 5-methylcytosine"
aatagtgaaacactagagacaatctgttcatttgtaatataattgaagagagatgaggagcgaaccactaaggtatatatgagaagctctgactctgaggactctgcagaggagacaaaagg

SEQ ID NO: 20171 - DNA, 122 bp, Homo sapiens
  misc_feature (61)..(62): /note="This region represents a CpG dinucleotide"
  misc_feature (61)..(61): /note="Nucleotide may be methylated to form 5-methylcytosine"
taatgcacttagaacactgagcaagcatgtgtcatacacgcaggagtgtgacagagaaagcgcaaataggccacaggaagccaggccaggggtcatccaggtctccatctcaaaacaggagg

SEQ ID NO: 20172 - DNA, 122 bp, Homo sapiens
  misc_feature (61)..(62): /note="This region represents a CpG dinucleotide"
  misc_feature (61)..(61): /note="Nucleotide may be methylated to form 5-methylcytosine"
ctagcctgcaggcatgccttgctgaaagcaacagaaatgttctgaaaacacgacttgcaacgaattgtcagtgggatcctatttaggtgcaagagggaagatcaatatctcgaatcaactac

SEQ ID NO: 20173 - DNA, 122 bp, Homo sapiens
  misc_feature (61)..(62): /note="This region represents a CpG dinucleotide"
  misc_feature (61)..(61): /note="Nucleotide may be methylated to form 5-methylcytosine"
tgtagggtgtctggaaggcaggtgcggcctgccacttctaatgcaagctgagaacaaacacggcatactgagcccaaatcggccttctgctgctagagacagaggtagaatttatgttttgc

SEQ ID NO: 20174 - DNA, 122 bp, Homo sapiens
  misc_feature (61)..(62): /note="This region represents a CpG dinucleotide"
  misc_feature (61)..(61): /note="Nucleotide may be methylated to form 5-methylcytosine"
ttcctaatgctctccctcccaggagcctggtctctaggcgcaactgagctggtgactcaccggacaactgtgcaaggtacctctctatgactcagttgcctcatctgcaaaatgaaaggaat

SEQ ID NO: 20175 - DNA, 122 bp, Homo sapiens
  misc_feature (61)..(62): /note="This region represents a CpG dinucleotide"
  misc_feature (61)..(61): /note="Nucleotide may be methylated to form 5-methylcytosine"
taaacattcttttctgtattacagaaccaagagcagatctgttaacacacgttacacacacgcatcaaggcttagtagataatgccaaacaatttctcataacaagttgtaataaatcacac

SEQ ID NO: 20176 - DNA, 122 bp, Homo sapiens
  misc_feature (61)..(62): /note="This region represents a CpG dinucleotide"
  misc_feature (61)..(61): /note="Nucleotide may be methylated to form 5-methylcytosine"
ctcaagtgatctgcctgccttggcctcctacagtgctgggattacaggtgtgagccaccacgcccggccctctgagtcaagatttcttagggaaactgtccaggtgtcctaagagggctctg

SEQ ID NO: 20177 - DNA, 122 bp, Homo sapiens
  misc_feature (61)..(62): /note="This region represents a CpG dinucleotide"
  misc_feature (61)..(61): /note="Nucleotide may be methylated to form 5-methylcytosine"
tgtttaatgggtagtttgttttgcaaagtgaaaagatttgtagaggttgaaaggtggtgacggttgtacgtgagtatacttaacaccactgaaatgtacacttggttaagatagtaaattct

SEQ ID NO: 20178 - DNA, 122 bp, Homo sapiens
  misc_feature (61)..(62): /note="This region represents a CpG dinucleotide"
  misc_feature (61)..(61): /note="Nucleotide may be methylated to form 5-methylcytosine"
taaatgtatataaccccaatgtgattactagtttgttatgaagcatatgtgcagtgagaacgtgctacaaagagaaagtgtatatggtagtgtgtgtagaaacgagacactggcttctcgta

SEQ ID NO: 20179 - DNA, 122 bp, Homo sapiens
  misc_feature (61)..(62): /note="This region represents a CpG dinucleotide"
  misc_feature (61)..(61): /note="Nucleotide may be methylated to form 5-methylcytosine"
tgggattacagatgtgagctaccgcgcccagccagttctgtgcgttttaaatgtatccaacgctcatagcaaacatccactgcacagatgaggaagttgaggttcagaggggctgaggccct

SEQ ID NO: 20180 - DNA, 122 bp, Homo sapiens
  misc_feature (61)..(62): /note="This region represents a CpG dinucleotide"
  misc_feature (61)..(61): /note="Nucleotide may be methylated to form 5-methylcytosine"
ccacactttacagataatgaatctgaagtttccatccacccatcccctcctccgctcaggcgctcaccaaatcttacactcatgaggtgctcagtagcctgtgctttggggcagcccacact

SEQ ID NO: 20181 - DNA, 122 bp, Homo sapiens
  misc_feature (61)..(62): /note="This region represents a CpG dinucleotide"
  misc_feature (61)..(61): /note="Nucleotide may be methylated to form 5-methylcytosine"
atgctgcacgtgcacgtggaccgtgacccccaggagctggtcacgccggtcaagtttgcccgtctctggactgagatccccacagccatcaccatcaaggagtgagaggggtggaggcaggg

SEQ ID NO: 20182 - DNA, 122 bp, Homo sapiens
  misc_feature (61)..(62): /note="This region represents a CpG dinucleotide"
  misc_feature (61)..(61): /note="Nucleotide may be methylated to form 5-methylcytosine"
ctcgtttccaggctggcatctgggacaggcgctcccgttctgctttctctcggcctcgaacggacgcctcctcctgccggcgccgggctagcagctgtagcttccagtctgggatggtggcc

SEQ ID NO: 20183 - DNA, 122 bp, Homo sapiens
  misc_feature (61)..(62): /note="This region represents a CpG dinucleotide"
  misc_feature (61)..(61): /note="Nucleotide may be methylated to form 5-methylcytosine"
atgaaagcaatcctgcttgatactattcacacggtgcatgattacttcacgggggtggaacggaacagtctgtcgccatttgatagtatggttccagaatgaaaacaaaaccactgaataaa

SEQ ID NO: 20184 - DNA, 122 bp, Homo sapiens
  misc_feature (61)..(62): /note="This region represents a CpG dinucleotide"
  misc_feature (61)..(61): /note="Nucleotide may be methylated to form 5-methylcytosine"
cagatactgaggtcacccattgtgttcaagttcctttaatttatctgaaatgagtctgggcgtggtggctcacgcctgtaatcccagcactttgggaagccaagccgggtggatcacttgag

SEQ ID NO: 20185 - DNA, 122 bp, Homo sapiens
  misc_feature (61)..(62): /note="This region represents a CpG dinucleotide"
  misc_feature (61)..(61): /note="Nucleotide may be methylated to form 5-methylcytosine"
ctctttatgggttgttaagattgttaaaattaagctgtctcttcctgcactgcagaatggcgttatacccagcaccctgcccgaggctggtcagataatgaagcagaacagcaaggtaatga

SEQ ID NO: 20186 - DNA, 122 bp, Homo sapiens
  misc_feature (61)..(62): /note="This region represents a CpG dinucleotide"
  misc_feature (61)..(61): /note="Nucleotide may be methylated to form 5-methylcytosine"
gtataccatggtagtcccataagattctaatggagctgaaaaattcctattgcctagtgacgttgtcgccattgcagtgtcttagtgcaattcattactcatgtgtttgtggtgatgctggt

SEQ ID NO: 20187 - DNA, 122 bp, Homo sapiens
  misc_feature (61)..(62): /note="This region represents a CpG dinucleotide"
  misc_feature (61)..(61): /note="Nucleotide may be methylated to form 5-methylcytosine"
ctcttgcttttgatttggtgttactggattcctttgagtcactaacatctttatgttgatcgcataacaggcagattagtaccactataacttcatgagtaacaacctcaaatgggtacttt

SEQ ID NO: 20188 - DNA, 122 bp, Homo sapiens
  misc_feature (61)..(62): /note="This region represents a CpG dinucleotide"
  misc_feature (61)..(61): /note="Nucleotide may be methylated to form 5-methylcytosine"
gtcagtattttggcagctgtacatccagcacacgtttgcccaaggtcgggggcaaaggcacggaccatctaggctcatggggcacttcagctgaactatacagtttgggccaaaaatccact

SEQ ID NO: 20189 - DNA, 122 bp, Homo sapiens
  misc_feature (61)..(62): /note="This region represents a CpG dinucleotide"
  misc_feature (61)..(61): /note="Nucleotide may be methylated to form 5-methylcytosine"
atgtttactagttgccaccccaggggtcatctgtcaaaaggccagatgaatcatcaaaagcgtcagatgaattaattgtgaaaaatagagtagataaagtgaatcacacacagaactactga

SEQ ID NO: 20190 - DNA, 122 bp, Homo sapiens
  misc_feature (61)..(62): /note="This region represents a CpG dinucleotide"
  misc_feature (61)..(61): /note="Nucleotide may be methylated to form 5-methylcytosine"
gctccagctgcgcgttgttcagtgaggttttcagctccttggtgtgggcgtgcagctcctcgtactcccccttcagctggtggtgcaggaaattgaccctggaggaggaagagtcacagggc

SEQ ID NO: 20191 - DNA, 122 bp, Homo sapiens
  misc_feature (61)..(62): /note="This region represents a CpG dinucleotide"
  misc_feature (61)..(61): /note="Nucleotide may be methylated to form 5-methylcytosine"
tttctagagggcctcatatgtcacatacattaactcacttaatccttacaataccactttcggccagatgctataattatccccattttcaaggtgagaaaacagaagtgcagagaggttta

SEQ ID NO: 20192 - DNA, 122 bp, Homo sapiens
  misc_feature (61)..(62): /note="This region represents a CpG dinucleotide"
  misc_feature (61)..(61): /note="Nucleotide may be methylated to form 5-methylcytosine"
tatattaatattactatcttcttttaatctcccacagtgtccatgcgttatcaggccctacgtgaattgatcaaaggatctttgcctgagagttgacagaggctccaaattccttgctgtct

SEQ ID NO: 20193 - DNA, 122 bp, Homo sapiens
  misc_feature (61)..(62): /note="This region represents a CpG dinucleotide"
  misc_feature (61)..(61): /note="Nucleotide may be methylated to form 5-methylcytosine"
gaggcaggagcagctccagggcaggtgtcactggggccctggacagaagcattggtgggccgtgactccacatgcctgagtcaccaggctcagaccagtgcctccttcctgttccaccctac

SEQ ID NO: 20194 - DNA, 122 bp, Homo sapiens
  misc_feature (61)..(62): /note="This region represents a CpG dinucleotide"
  misc_feature (61)..(61): /note="Nucleotide may be methylated to form 5-methylcytosine"
catgactcataccaaggaactgattcaaccagtccagtggcccctacccagaaactgactcgcacccaagaaattttttgaccaagatccatggtttcatccccaaccaattagcagcaccc

SEQ ID NO: 20195 - DNA, 122 bp, Homo sapiens
  misc_feature (61)..(62): /note="This region represents a CpG dinucleotide"
  misc_feature (61)..(61): /note="Nucleotide may be methylated to form 5-methylcytosine"
ttgggaagacacacccccagcctggaaagtgagagtccctgccctcccacctccacaggccggccctgtccaccctgaggttgcctgtgtcaaggaccattgccctggctccagcaggggca

SEQ ID NO: 20196 - DNA, 122 bp, Homo sapiens
  misc_feature (61)..(62): /note="This region represents a CpG dinucleotide"
  misc_feature (61)..(61): /note="Nucleotide may be methylated to form 5-methylcytosine"
gggcagctcctccagcccagtgcttcctggctaagacctgcctgcaaccagtcccccacgcggacttcctgccacctgccagacagaatggggttgaatgcaaatggttcatggcatcacca

SEQ ID NO: 20197 - DNA, 122 bp, Homo sapiens
  misc_feature (61)..(62): /note="This region represents a CpG dinucleotide"
  misc_feature (61)..(61): /note="Nucleotide may be methylated to form 5-methylcytosine"
caaactcctcccaatttgcctggaatttttcccagttttagcattgaaagtcccacctcccgggaaatccctcaatccctcaatccctggctaactgggatagtcaatcactgtatcctcaa

SEQ ID NO: 20198 - DNA, 122 bp, Homo sapiens
  misc_feature (61)..(62): /note="This region represents a CpG dinucleotide"
  misc_feature (61)..(61): /note="Nucleotide may be methylated to form 5-methylcytosine"
cgttatgagcagactggggcaaaaatgacatttaagatattgcacaagttttaaaatgagcggctctacgaataaacagagatttttaaaagaaaggggaaaaaagaatttataaacccaat

SEQ ID NO: 20199 - DNA, 122 bp, Homo sapiens
  misc_feature (61)..(62): /note="This region represents a CpG dinucleotide"
  misc_feature (61)..(61): /note="Nucleotide may be methylated to form 5-methylcytosine"
aaggcagtggccaagggctcagaggtcttcagcaaagtcaccaaaaaaatggttcacaaacgttctgctttgggcagtaagaggattatttcacattctggatgtgtccacttgagggatgt

SEQ ID NO: 20200 - DNA, 122 bp, Homo sapiens
  misc_feature (61)..(62): /note="This region represents a CpG dinucleotide"
  misc_feature (61)..(61): /note="Nucleotide may be methylated to form 5-methylcytosine"
acgtcagtgattggttgtattactgagctactggaaaagctgcagcatctgcagcaattgcggaggctcaggaaacagtaccccagatgacagcctcagaagcaagagcttctctctgctca

SEQ ID NO: 20201 - DNA, 122 bp, Homo sapiens
  misc_feature (61)..(62): /note="This region represents a CpG dinucleotide"
  misc_feature (61)..(61): /note="Nucleotide may be methylated to form 5-methylcytosine"
tcctcacaacaacctaatggggtaggcgctactattatccctaaggctgagatgaggaaacggaggcatagtagggtgaggtaacttccccaaggtcacaaagctggtaggcaaaagagcca

SEQ ID NO: 20202 - DNA, 122 bp, Homo sapiens
  misc_feature (61)..(62): /note="This region represents a CpG dinucleotide"
  misc_feature (61)..(61): /note="Nucleotide may be methylated to form 5-methylcytosine"
catagcctgggagaccagatcgtgcacttcctggccaatgacctggacatttcttccaaacgcaggactcctcaagtggaaaatctttgttgtgaagcaccctttgaggtttgccaagattt

SEQ ID NO: 20203 - DNA, 122 bp, Homo sapiens
  misc_feature (61)..(62): /note="This region represents a CpG dinucleotide"
  misc_feature (61)..(61): /note="Nucleotide may be methylated to form 5-methylcytosine"
tgaccgaaccaactgtggggctggctgggccctgggtggagggaagagagaggagctgatcgggtttcccagctttgaagtaaagaatgagccagaatgaagaagctcctgatcaaaggctg

SEQ ID NO: 20204 - DNA, 122 bp, Homo sapiens
  misc_feature (61)..(62): /note="This region represents a CpG dinucleotide"
  misc_feature (61)..(61): /note="Nucleotide may be methylated to form 5-methylcytosine"
aattcaagcctcctccaggacttggactgttgatctccctcctcccatcagactgtgtcccgatatggcactgtgtctctccctaaggtgtgtactctcctgagagacgcttccttggaact

SEQ ID NO: 20205 - DNA, 122 bp, Homo sapiens
  misc_feature (61)..(62): /note="This region represents a CpG dinucleotide"
  misc_feature (61)..(61): /note="Nucleotide may be methylated to form 5-methylcytosine"
ttttctgagtaataaggcctgaggcagttaagtaatttccaaagaccaacactctcagagcgtggatgtctaaccttcaagttcaggctcatcagcttcagagacagggtctgaggaggggc

SEQ ID NO: 20206 - DNA, 122 bp, Homo sapiens
  misc_feature (61)..(62): /note="This region represents a CpG dinucleotide"
  misc_feature (61)..(61): /note="Nucleotide may be methylated to form 5-methylcytosine"
tttaatagaatctcttgtgcataacaaggcgagacatggagaacactttaaggaataacacgctgtgtgtttgctcattttcccaagtccctggagtgtaccacactgctttactcatgtcc

SEQ ID NO: 20207 - DNA, 122 bp, Homo sapiens
  misc_feature (61)..(62): /note="This region represents a CpG dinucleotide"
  misc_feature (61)..(61): /note="Nucleotide may be methylated to form 5-methylcytosine"
tctatgtgggcaccaaggaagactgtatctgccatagaaatgcatttggctcacactgtccgtatcacactgatctcatctctccatcatactgagtcacaatccataaaaaaagtgctcaa

SEQ ID NO: 20208 - DNA, 122 bp, Homo sapiens
  misc_feature (61)..(62): /note="This region represents a CpG dinucleotide"
  misc_feature (61)..(61): /note="Nucleotide may be methylated to form 5-methylcytosine"
ggagataatgtcaagtagggtgtatgtgtcacagcaatcagaagttaatgcctaccactccgggagaactcatactcctgtggtagtgtttaaggaactgctgacacattcttccagcttta

SEQ ID NO: 20209 - DNA, 122 bp, Homo sapiens
  misc_feature (61)..(62): /note="This region represents a CpG dinucleotide"
  misc_feature (61)..(61): /note="Nucleotide may be methylated to form 5-methylcytosine"
ggtctctcgcagcattcagttctctcaattttcatatttgatgagtcatgtatttcctctcgttcatccttttgtttttcctttttctgctgatagctaagtgttaattttgtagtgcttct

SEQ ID NO: 20210 - DNA, 122 bp, Homo sapiens
  misc_feature (61)..(62): /note="This region represents a CpG dinucleotide"
  misc_feature (61)..(61): /note="Nucleotide may be methylated to form 5-methylcytosine"
tcacatggtagttctctgttcaactgatggggacctgccaggctgcttcccacgcagccgcgccgtttcacctccccgccaacaccacacgggcctgtttctgcaggtcctcagtgacgcgt

SEQ ID NO: 20211 - DNA, 122 bp, Homo sapiens
  misc_feature (61)..(62): /note="This region represents a CpG dinucleotide"
  misc_feature (61)..(61): /note="Nucleotide may be methylated to form 5-methylcytosine"
cacagggtcaggtacagggactggaaataaagataaacaagttatgggtaagtagaccaacgcagtaagagtagattaaatcaccccgaggaaaaatccgatagagcaaactcagtactgtg

SEQ ID NO: 20212 - DNA, 122 bp, Homo sapiens
  misc_feature (61)..(62): /note="This region represents a CpG dinucleotide"
  misc_feature (61)..(61): /note="Nucleotide may be methylated to form 5-methylcytosine"
ctaatggaaaaagaacacataatcagatcatttcaatgtcctatgataagcagagagctacgcacaaagactgatgtgagcacaaagcatgacctccctcagataccactctggaattacaa

SEQ ID NO: 20213 - DNA, 122 bp, Homo sapiens
  misc_feature (61)..(62): /note="This region represents a CpG dinucleotide"
  misc_feature (61)..(61): /note="Nucleotide may be methylated to form 5-methylcytosine"
taatacagctgccttggacgaatgttccctgcctgctgcgtatttactcagtcatcaaagcgcaaatgtggtgggtaacagatcactcccttcgagagaatccactccactgccagctcaca

SEQ ID NO: 20214 - DNA, 122 bp, Homo sapiens
  misc_feature (61)..(62): /note="This region represents a CpG dinucleotide"
  misc_feature (61)..(61): /note="Nucleotide may be methylated to form 5-methylcytosine"
ccaaagattttaaagccaatccctggcatgacgtcattttcctctgcagactttaatatgcgtctctaaaatatatggacattttcttgcatagcgacaatggcattatcacaacaactaaa

SEQ ID NO: 20215 - DNA, 122 bp, Homo sapiens
  misc_feature (61)..(62): /note="This region represents a CpG dinucleotide"
  misc_feature (61)..(61): /note="Nucleotide may be methylated to form 5-methylcytosine"
gatacactaaacgtgcccagagatgtttcagattgtcccaggaacatacataccaggattcgttagggcatgatgtttatctgtgcatccaagttgaaatggtgaaagacttgcatatgatt

SEQ ID NO: 20216 - DNA, 122 bp, Homo sapiens
  misc_feature (61)..(62): /note="This region represents a CpG dinucleotide"
  misc_feature (61)..(61): /note="Nucleotide may be methylated to form 5-methylcytosine"
ccacagttgcattgtcaaagccaccagtcacctgacttttgttgctggctggctggagaccgtggccctgggttttccatacatcagcttggaactctgagctgagatcagcttcctggagg

SEQ ID NO: 20217 - DNA, 122 bp, Homo sapiens
  misc_feature (61)..(62): /note="This region represents a CpG dinucleotide"
  misc_feature (61)..(61): /note="Nucleotide may be methylated to form 5-methylcytosine"
ggctcagcatttcaaccccatatcaagccacactttcacaatcacttcaactgagtgggacgagctagaggtttaagtatcagcaaccagatgtttccatatggaaatgccacttaccactt

SEQ ID NO: 20218 - DNA, 122 bp, Homo sapiens
  misc_feature (61)..(62): /note="This region represents a CpG dinucleotide"
  misc_feature (61)..(61): /note="Nucleotide may be methylated to form 5-methylcytosine"
atattcttgactttacctttctaccgtgctcactgtggccttgtgacttggtcggcatttcgtagtctgctgaaggtgggtgctgggttccgctttggtggggagacctgttgcctacagca

SEQ ID NO: 20219 - DNA, 122 bp, Homo sapiens
  misc_feature (61)..(62): /note="This region represents a CpG dinucleotide"
  misc_feature (61)..(61): /note="Nucleotide may be methylated to form 5-methylcytosine"
ccctgtacagacagcctctcgagccaaactgctggcctggtgcccacagagacttggtggcggctgccctgtgattgtggaagatgccacccaaatgcccacataagagtcagacactggtc

SEQ ID NO: 20220 - DNA, 122 bp, Homo sapiens
  misc_feature (61)..(62): /note="This region represents a CpG dinucleotide"
  misc_feature (61)..(61): /note="Nucleotide may be methylated to form 5-methylcytosine"
acaagaccaaagtcacctattcagcccacttagaggcagcagaaagttttttccctttgccgtggggattaccctaagatctagggtctcccaacagtgtattctcagacacaaagggaact

SEQ ID NO: 20221 - DNA, 122 bp, Homo sapiens
  misc_feature (61)..(62): /note="This region represents a CpG dinucleotide"
  misc_feature (61)..(61): /note="Nucleotide may be methylated to form 5-methylcytosine"
tgctcacagaccagcatcgctccccacctctccccgcccctgccgtggttgaggccgcctcgcctcggcaggaagcgcccagcctgatttcctacaagtgtttgtcagaaggagggggtttg

SEQ ID NO: 20222 - DNA, 122 bp, Homo sapiens
  misc_feature (61)..(62): /note="This region represents a CpG dinucleotide"
  misc_feature (61)..(61): /note="Nucleotide may be methylated to form 5-methylcytosine"
ggaggtaaaagtgtctgcctcagttggttcatcagcgccagtggcagtgctctaaggagacgccaggcctccggtaaccactcagtgtcagaagttcaggcagcaacaggtgcatgaggaag

SEQ ID NO: 20223 - DNA, 122 bp, Homo sapiens
  misc_feature (61)..(62): /note="This region represents a CpG dinucleotide"
  misc_feature (61)..(61): /note="Nucleotide may be methylated to form 5-methylcytosine"
gggcggcaggaaggggaggcggcggccactcccggccaagccctggagtgaagaaatctccgggacttccagtaattgccgtccagccacacgcaggcacttgtgcaatcccgtgggggaga

SEQ ID NO: 20224 - DNA, 122 bp, Homo sapiens
  misc_feature (61)..(62): /note="This region represents a CpG dinucleotide"
  misc_feature (61)..(61): /note="Nucleotide may be methylated to form 5-methylcytosine"
tcactgccccgggccagcggggtcggctcgcccctcccagtgcggggcctgtccagcccacgcccacccctgaactcgtgctggcccgcaagcgccgagcgcagccccagttcccgcccacg

SEQ ID NO: 20225 - DNA, 122 bp, Homo sapiens
  misc_feature (61)..(62): /note="This region represents a CpG dinucleotide"
  misc_feature (61)..(61): /note="Nucleotide may be methylated to form 5-methylcytosine"
agtattgacgctgtaagagcatcaggttggttcccattgtatcttctttactaatacgttcgcgtttttgacctagatttctttcttctaagataaatactgataaattaacagggtcaggc

SEQ ID NO: 20226 - DNA, 122 bp, Homo sapiens
  misc_feature (61)..(62): /note="This region represents a CpG dinucleotide"
  misc_feature (61)..(61): /note="Nucleotide may be methylated to form 5-methylcytosine"
tgtcctggctgggatgtacctggcagccccagcagattgttcatgtgttatttactcatacgcatacgttgtagcacacaaactgcttcttaggagacgaacttggtgagcacaggcactga

SEQ ID NO: 20227 - DNA, 122 bp, Homo sapiens
  misc_feature (61)..(62): /note="This region represents a CpG dinucleotide"
  misc_feature (61)..(61): /note="Nucleotide may be methylated to form 5-methylcytosine"
ctgcctgtcctgaggatgagggtcatcaactgagtcggggccacagggcagccatgggtgcgcgagtgcagggccgggcctgtctcctccgggcggcgtggcaggtggctgggccaagatgg

SEQ ID NO: 20228 - DNA, 122 bp, Homo sapiens
  misc_feature (61)..(62): /note="This region represents a CpG dinucleotide"
  misc_feature (61)..(61): /note="Nucleotide may be methylated to form 5-methylcytosine"
atcgcgcccttagactcacaacagttgcagatctaacgtaatttttaaagccacctttggcgcctgcatgtttatccttccaaaagtccaggcgccccttctctcccgcatgcctcggtcac

SEQ ID NO: 20229 - DNA, 122 bp, Homo sapiens
  misc_feature (61)..(62): /note="This region represents a CpG dinucleotide"
  misc_feature (61)..(61): /note="Nucleotide may be methylated to form 5-methylcytosine"
ggtttacagcacaggctacatgtatttctaaccactggaatctagtaaatcagtcaacctcgtaggttctgttttctcccctagaaaatgagggtacttttctactcaagcagtcattatga

SEQ ID NO: 20230 - DNA, 122 bp, Homo sapiens
  misc_feature (61)..(62): /note="This region represents a CpG dinucleotide"
  misc_feature (61)..(61): /note="Nucleotide may be methylated to form 5-methylcytosine"
aattggaaattactcaaatcctatgtcaaaatatcactgcataggctgggctcagtggctcgtgcctgtaatcccagcactttgggaaggcaaggcaggtggaacacttgaggtcaggagtt

SEQ ID NO: 20231 - DNA, 122 bp, Homo sapiens
  misc_feature (61)..(62): /note="This region represents a CpG dinucleotide"
  misc_feature (61)..(61): /note="Nucleotide may be methylated to form 5-methylcytosine"
tcaattctgaccttgtagctccaaagcagccattgacaagacttctacaatggatgtggccgtattccagtaaaattttatttgccaaaaccggtgcctgctaactatagtttgtttatctc

SEQ ID NO: 20232 - DNA, 122 bp, Homo sapiens
  misc_feature (61)..(62): /note="This region represents a CpG dinucleotide"
  misc_feature (61)..(61): /note="Nucleotide may be methylated to form 5-methylcytosine"
ataaattacttactgaaatagagcttgtgacagattcccagttggtctctgaagctgctgcgggttggaaatcttcctggaaggcaaagaaacatctgtgagtcagtcaaacctctgttcaa

SEQ ID NO: 20233 - DNA, 122 bp, Homo sapiens
  misc_feature (61)..(62): /note="This region represents a CpG dinucleotide"
  misc_feature (61)..(61): /note="Nucleotide may be methylated to form 5-methylcytosine"
tgcagatccgggacaaaggaagatctctcccaactctcagggtggtgcactgtgctatctcgcctccagatgagaagtgacttgagagattttctcattagttactttacttcccagtttgc

SEQ ID NO: 20234 - DNA, 122 bp, Homo sapiens
  misc_feature (61)..(62): /note="This region represents a CpG dinucleotide"
  misc_feature (61)..(61): /note="Nucleotide may be methylated to form 5-methylcytosine"
atgtgcacaagttgggggctgagagcatagggcagggtgttgctcatctgcagcatgtgacgtgaacagaggcctatggaaaggagtggtatgtcaggtggtggcaagagggtgttccacct

SEQ ID NO: 20235 - DNA, 122 bp, Homo sapiens
  misc_feature (61)..(62): /note="This region represents a CpG dinucleotide"
  misc_feature (61)..(61): /note="Nucleotide may be methylated to form 5-methylcytosine"
gcttcgccctgctaggattagcgtctgtataaagagagacacctgagagcttcgcctacacgcttccccactgagggaagaccatgtgactatacaacaggaaggtagttgtttacaagcca

SEQ ID NO: 20236 - DNA, 122 bp, Homo sapiens
  misc_feature (61)..(62): /note="This region represents a CpG dinucleotide"
  misc_feature (61)..(61): /note="Nucleotide may be methylated to form 5-methylcytosine"
gttctttttattattgttattattacatctctgatagggagtccagttttcttgattttgcgatagccaataataattgagggagttttataatgattcagcatgggaaaatcagagttaag

SEQ ID NO: 20237 - DNA, 122 bp, Homo sapiens
  misc_feature (61)..(62): /note="This region represents a CpG dinucleotide"
  misc_feature (61)..(61): /note="Nucleotide may be methylated to form 5-methylcytosine"
acttcccctttgctcagagggtctgactcccttctcttctctcagggctgctgcctgtgacgcgccaaggccaggctctgagccccttgggactactgtgcccataacagcccataatagcc

SEQ ID NO: 20238 - DNA, 122 bp, Homo sapiens
  misc_feature (61)..(62): /note="This region represents a CpG dinucleotide"
  misc_feature (61)..(61): /note="Nucleotide may be methylated to form 5-methylcytosine"
cttgaactgttgacctcgtgatccgcccgcctcggccttccaaagtgctgcgattacaggcgtgagccaccacactggccctatagctcttttggaatttgtctaacaggtttttcagtttt

SEQ ID NO: 20239 - DNA, 122 bp, Homo sapiens
  misc_feature (61)..(62): /note="This region represents a CpG dinucleotide"
  misc_feature (61)..(61): /note="Nucleotide may be methylated to form 5-methylcytosine"
ggaagcaggatggaaggatggaagctggactgaacagcttctggggttcccctacagtgccggggatccacagtgattgtttcttctacaatcactgagagaatcactcccaggaccttgcc

SEQ ID NO: 20240 - DNA, 122 bp, Homo sapiens
  misc_feature (61)..(62): /note="This region represents a CpG dinucleotide"
  misc_feature (61)..(61): /note="Nucleotide may be methylated to form 5-methylcytosine"
aggagaaatttacctcattacttttcctcttcacatttcatatgaatgcttttttagaaacgcaatttgcttttttttgaaaaagaacttaagcaccacacaagaaacaaattcaaaccaca

SEQ ID NO: 20241 - DNA, 122 bp, Homo sapiens
  misc_feature (61)..(62): /note="This region represents a CpG dinucleotide"
  misc_feature (61)..(61): /note="Nucleotide may be methylated to form 5-methylcytosine"
ccctcccaaggccacacccatcaatttcttgaaaaggcatttcaggcagtcgtggttttgcgtagtacaagagaaataaggaaatgactcgtgggtgagtggagagtccaatggcacccttg

SEQ ID NO: 20242 - DNA, 122 bp, Homo sapiens
  misc_feature (61)..(62): /note="This region represents a CpG dinucleotide"
  misc_feature (61)..(61): /note="Nucleotide may be methylated to form 5-methylcytosine"
gaggcttttccttcttgcccttttcggagtattgcaaaggagctaaaactggtgtgcaaccgcacagcgctcctggtcgtcctcgcgcgcctctccctaccacgggtgctcgggacggctgg

SEQ ID NO: 20243 - DNA, 122 bp, Homo sapiens
  misc_feature (61)..(62): /note="This region represents a CpG dinucleotide"
  misc_feature (61)..(61): /note="Nucleotide may be methylated to form 5-methylcytosine"
agacagggagagtcttgtaagtcacagccaagaacctgctttatcctgcaaggagtagagcgctattaagaggcttaaccagccgggcacggtggctcacgcctggaatcccagcactttgg

SEQ ID NO: 20244 - DNA, 122 bp, Homo sapiens
  misc_feature (61)..(62): /note="This region represents a CpG dinucleotide"
  misc_feature (61)..(61): /note="Nucleotide may be methylated to form 5-methylcytosine"
gaacacagcaggatgcaagcacatgatggctctggtggatgacttcatgagggtgtagagcgtagaacagaagagagaattagtcccaagagagaagtcagcatgctctgagcaggcctatt

SEQ ID NO: 20245 - DNA, 122 bp, Homo sapiens
  misc_feature (61)..(62): /note="This region represents a CpG dinucleotide"
  misc_feature (61)..(61): /note="Nucleotide may be methylated to form 5-methylcytosine"
ggtttgagtcacattctccatagagcagtttgcccttcccagttctgtgttagtcagccccgttctcacttgcatcctgcctcgagtcacttgagcagcctctgggttcttccacagctcct

SEQ ID NO: 20246 - DNA, 122 bp, Homo sapiens
  misc_feature (61)..(62): /note="This region represents a CpG dinucleotide"
  misc_feature (61)..(61): /note="Nucleotide may be methylated to form 5-methylcytosine"
ttactcatcataacctgttttcttggaaacagatccctcctgggagagcaggaagtttgacgtcaattttaaggtttccccaagtactggcagggaattgctctgtgggtgcctcctacgag

SEQ ID NO: 20247 - DNA, 122 bp, Homo sapiens
  misc_feature (61)..(62): /note="This region represents a CpG dinucleotide"
  misc_feature (61)..(61): /note="Nucleotide may be methylated to form 5-methylcytosine"
tgacctgggagctgggccctgtgtgaaaaatgcagcctttcctcagatggaatgtgtgcccgtcacctctgaatcaaggtttctttccctggggtcaatagttgtgtaaatagctcagggac

SEQ ID NO: 20248 - DNA, 122 bp, Homo sapiens
  misc_feature (61)..(62): /note="This region represents a CpG dinucleotide"
  misc_feature (61)..(61): /note="Nucleotide may be methylated to form 5-methylcytosine"
ttcagcgtccaggaggagctggatttcaccctgaagggcaacctcagctttggctgggtccgccaggtgtgtgggtgcaacgacagagcccctgccccagactcaggcgggacctggcatgt

SEQ ID NO: 20249 - DNA, 122 bp, Homo sapiens
  misc_feature (61)..(62): /note="This region represents a CpG dinucleotide"
  misc_feature (61)..(61): /note="Nucleotide may be methylated to form 5-methylcytosine"
catgtagaccactatttcccaacctgcaagtgcatcatggcctttggtgtgtcagggacacgccttgggtgtgtgtctcagtctaaagcttcctccttttcacaagcttcctgtttctcatc

SEQ ID NO: 20250 - DNA, 122 bp, Homo sapiens
  misc_feature (61)..(62): /note="This region represents a CpG dinucleotide"
  misc_feature (61)..(61): /note="Nucleotide may be methylated to form 5-methylcytosine"
acctacagctgatgggctagtctgacaccctgttcaaggccaactcacagttccaggtgacgtgaataactgccctggcctggccattcacccttgcctgcaggtgtcccacacccagaagt

SEQ ID NO: 20251 - DNA, 122 bp, Homo sapiens
  misc_feature (61)..(62): /note="This region represents a CpG dinucleotide"
  misc_feature (61)..(61): /note="Nucleotide may be methylated to form 5-methylcytosine"
tgcaggattgtgaccatgagccacctcacacgtacctacagcctcgcgccactctgccagcgcgtacccacagccaagggcccatcagcaagctcagccccgcagccactcatgactctcca

SEQ ID NO: 20252 - DNA, 122 bp, Homo sapiens
  misc_feature (61)..(62): /note="This region represents a CpG dinucleotide"
  misc_feature (61)..(61): /note="Nucleotide may be methylated to form 5-methylcytosine"
taatccagtcttcatcagccatcactcttcctgtattttgttcaagaggcactaattgttcgcatttggcaggtttaacacttcctgacagagaggctattaaggggaagtattctccaata

SEQ ID NO: 20253 - DNA, 122 bp, Homo sapiens
  misc_feature (61)..(62): /note="This region represents a CpG dinucleotide"
  misc_feature (61)..(61): /note="Nucleotide may be methylated to form 5-methylcytosine"
agtaggacgtcaggcttgcaagctctgggattaggccgaccagagcccatatcccagtcccgcctcttactgcctgcttgatctcaagcaagaccgctttgttcatgggcgaaaggagcgcc

SEQ ID NO: 20254 - DNA, 122 bp, Homo sapiens
  misc_feature (61)..(62): /note="This region represents a CpG dinucleotide"
  misc_feature (61)..(61): /note="Nucleotide may be methylated to form 5-methylcytosine"
ggggtctcgggttctagaaacttgtatgtcttcatctagctgggatcacccaggtggatgcgtgtctaaaaatcagttgagttgcttacttaagatgtgtgcgttttgtcagatgtaagtga

SEQ ID NO: 20255 - DNA, 122 bp, Homo sapiens
  misc_feature (61)..(62): /note="This region represents a CpG dinucleotide"
  misc_feature (61)..(61): /note="Nucleotide may be methylated to form 5-methylcytosine"
aattgtggtcctccagactttggatgtgctcacattaggaagcttttggcaaggacttcacggatagcattgcaagctgaggatctgtataaaatgatcagatccaggattccactagttgg

SEQ ID NO: 20256 - DNA, 122 bp, Homo sapiens
  misc_feature (61)..(62): /note="This region represents a CpG dinucleotide"
  misc_feature (61)..(61): /note="Nucleotide may be methylated to form 5-methylcytosine"
ggtgcccagccctttatacattatcctttaagccatctacaacgaacactctcataacaacgcaaaaaagaaacaaagggccaaagtgaagaagtgaacaccaccctcttttcatgccctca

SEQ ID NO: 20257 - DNA, 122 bp, Homo sapiens
  misc_feature (61)..(62): /note="This region represents a CpG dinucleotide"
  misc_feature (61)..(61): /note="Nucleotide may be methylated to form 5-methylcytosine"
caaatgaccaaaataatgcagagagccactaagtggcttatcaaggtcgcacatgtagtacgtggcagggcttggatttaaaccaagtagtctgactcaagagttcattttctatgctgaca

SEQ ID NO: 20258 - DNA, 122 bp, Homo sapiens
  misc_feature (61)..(62): /note="This region represents a CpG dinucleotide"
  misc_feature (61)..(61): /note="Nucleotide may be methylated to form 5-methylcytosine"
accaggctgtcttcatttcaatttcacatcaacagttatacagatgagaaaatgacctgacgtgaggctaagtaatgtgctaaaggttatgcaaatattgtgtcacagccaagaaggaagga

SEQ ID NO: 20259 - DNA, 122 bp, Homo sapiens
  misc_feature (61)..(62): /note="This region represents a CpG dinucleotide"
  misc_feature (61)..(61): /note="Nucleotide may be methylated to form 5-methylcytosine"
cggcattgtctgtttctaaagaattgtaaactttcatgtgttacattacagaaatctgaacggagaggattaaccaaataccatttggacttaaaagcagcttgaggccgggcgcggtggct

SEQ ID NO: 20260 - DNA, 122 bp, Homo sapiens
  misc_feature (61)..(62): /note="This region represents a CpG dinucleotide"
  misc_feature (61)..(61): /note="Nucleotide may be methylated to form 5-methylcytosine"
ttaggctattttaaaaagggggaaaaatacagaaaccttgttaccatggagactgtaagccggtcagcccatctgctgaagaggatatataattttgtaagtagaatttttaaaaccttact

SEQ ID NO: 20261 - DNA, 122 bp, Homo sapiens
  misc_feature (61)..(62): /note="This region represents a CpG dinucleotide"
  misc_feature (61)..(61): /note="Nucleotide may be methylated to form 5-methylcytosine"
gttaaaatgagggcattgattggaaaagaattggaccctgcaacttggaatggggatgtgcgggaggaccctgatgaatctggagacactcagcttgtaatctctgatgaaactttttttgc

SEQ ID NO: 20262 - DNA, 122 bp, Homo sapiens
  misc_feature (61)..(62): /note="This region represents a CpG dinucleotide"
  misc_feature (61)..(61): /note="Nucleotide may be methylated to form 5-methylcytosine"
aatatgaatctctgccccctttcaaaagctttttgttaggcagatgagtaataacaattgcgtcttatgcaatgcactgaggtcttttaagtgttttggaatgtctctacctacagggagtc

SEQ ID NO: 20263 - DNA, 122 bp, Homo sapiens
  misc_feature (61)..(62): /note="This region represents a CpG dinucleotide"
  misc_feature (61)..(61): /note="Nucleotide may be methylated to form 5-methylcytosine"
cccagaatcaaaacctttattttaacaggatcccaggtgactggaatgcacgtcagggtccgagaggcaggctctagttctgacaggatcagaaataggtctcctgtagccagagcagaaca

SEQ ID NO: 20264 - DNA, 122 bp, Homo sapiens
  misc_feature (61)..(62): /note="This region represents a CpG dinucleotide"
  misc_feature (61)..(61): /note="Nucleotide may be methylated to form 5-methylcytosine"
agtcctggcctgccctccacgaagccccgcccctacgcgccggcccctcccacctcacctcggccacgcccccttcgcaggtggtcagcctggcgcacaatctcatctacttcggcttctac

SEQ ID NO: 20265 - DNA, 122 bp, Homo sapiens
  misc_feature (61)..(62): /note="This region represents a CpG dinucleotide"
  misc_feature (61)..(61): /note="Nucleotide may be methylated to form 5-methylcytosine"
accgctgcatcaaggagtcttagtcatcaaaacccacaaaaccccccaaaaaagaagtgacggagggcagctcacacatgtgaaaagctagtctttgataatgtcaactgccagagaagtcc

SEQ ID NO: 20266 - DNA, 122 bp, Homo sapiens
  misc_feature (61)..(62): /note="This region represents a CpG dinucleotide"
  misc_feature (61)..(61): /note="Nucleotide may be methylated to form 5-methylcytosine"
ttaccatcagctcaaccagactttggcaatgtcaagatgactttgagacaagcctgtgaccgttaatgaattactccaggggaatttttctgtagctactggtttctcttcctgatcagcct

SEQ ID NO: 20267 - DNA, 122 bp, Homo sapiens
  misc_feature (61)..(62): /note="This region represents a CpG dinucleotide"
  misc_feature (61)..(61): /note="Nucleotide may be methylated to form 5-methylcytosine"
aggtggtgatttatgatgcctgtgtacttccctgtggtgcccaggcctgcagattacagacgctgtgtaattagagaatccctctccacatgtgttctctgaacagggagcccagggaggct

SEQ ID NO: 20268 - DNA, 122 bp, Homo sapiens
  misc_feature (61)..(62): /note="This region represents a CpG dinucleotide"
  misc_feature (61)..(61): /note="Nucleotide may be methylated to form 5-methylcytosine"
aagtgcactaggaagaggaccaagtgagcagctcgagaaaccaagcaaacaagtgcatggcgtgacctcttgactcgtggttttctacattggcatatttctggggtcttgcgtcacttctc

SEQ ID NO: 20269 - DNA, 122 bp, Homo sapiens
  misc_feature (61)..(62): /note="This region represents a CpG dinucleotide"
  misc_feature (61)..(61): /note="Nucleotide may be methylated to form 5-methylcytosine"
gttctccagcaggcgctgcaagggctggcctgcctgctgcctctgtgcatgaagctgctgcgtccaggaaaactgagatgacctggactgctggttgtttctacctgtgaatcaccccagag

SEQ ID NO: 20270 - DNA, 122 bp, Homo sapiens
  misc_feature (61)..(62): /note="This region represents a CpG dinucleotide"
  misc_feature (61)..(61): /note="Nucleotide may be methylated to form 5-methylcytosine"
atgtgtttggagtcaaaaggttttgtcgcagcctactgagacgcctggaagcacaaacttcgattggtctgaagcgagaatttggaattagcaattaggtggggatctagttgagaggaaat

SEQ ID NO: 20271 - DNA, 122 bp, Homo sapiens
  misc_feature (61)..(62): /note="This region represents a CpG dinucleotide"
  misc_feature (61)..(61): /note="Nucleotide may be methylated to form 5-methylcytosine"
taaaaatgttgtctgctatgcaactgaactgcaaagctttacagagaacactggcaaaaacgttgaccacagtccaagtggctaactcaaaaacagttgagtcatttgggtagggaagaaaa

SEQ ID NO: 20272 - DNA, 122 bp, Homo sapiens
  misc_feature (61)..(62): /note="This region represents a CpG dinucleotide"
  misc_feature (61)..(61): /note="Nucleotide may be methylated to form 5-methylcytosine"
ctactttttttgttcctgcattcacaaaataaaaatagctgtgtggagggagtatgctggcgcttactctctgggatagccagctgttctaggattgcactagtgatccataagatacatcc

SEQ ID NO: 20273 - DNA, 122 bp, Homo sapiens
  misc_feature (61)..(62): /note="This region represents a CpG dinucleotide"
  misc_feature (61)..(61): /note="Nucleotide may be methylated to form 5-methylcytosine"
tattctagtattttccatggtaatccctcaggccaggtatacagttcagcatctctttggcggagagcaactagtttgtagtacagcttgggtaaattttaataacaaaattgtattgccag

SEQ ID NO: 20274 - DNA, 122 bp, Homo sapiens
  misc_feature (61)..(62): /note="This region represents a CpG dinucleotide"
  misc_feature (61)..(61): /note="Nucleotide may be methylated to form 5-methylcytosine"
tgctcatttcactccagctacattgacctccttgcctttgttgtgttttgaaaacaccggcgtggtcctaccgcaggaattttgtacttactgttccttttgccacattcatcattcatatg

SEQ ID NO: 20275 - DNA, 122 bp, Homo sapiens
  misc_feature (61)..(62): /note="This region represents a CpG dinucleotide"
  misc_feature (61)..(61): /note="Nucleotide may be methylated to form 5-methylcytosine"
ggtctttaaaagagcaaaccacagctattctcacttcccagaaccctttgctgattacagcgtgagatcaaatccccatggacagggcggactggtatttcaaacatgaaacactggaatgc

SEQ ID NO: 20276 - DNA, 122 bp, Homo sapiens
  misc_feature (61)..(62): /note="This region represents a CpG dinucleotide"
  misc_feature (61)..(61): /note="Nucleotide may be methylated to form 5-methylcytosine"
gctgtggttgcatagggaggatcatgcagggggtggggctatagagcttccaagagattacgtcctgtgtctttagctaccaggatgagtcgagaaagactaccagctgggggcatggctga

SEQ ID NO: 20277 - DNA, 122 bp, Homo sapiens
  misc_feature (61)..(62): /note="This region represents a CpG dinucleotide"
  misc_feature (61)..(61): /note="Nucleotide may be methylated to form 5-methylcytosine"
ctgggtaccagacgcatggtctaggtagggggtgtcatgtactaggtgagcatggggttccgctgggcatgttcccttgtcttgtaggatgttagctctgaggggcgtggctggaagaaggc

SEQ ID NO: 20278 - DNA, 122 bp, Homo sapiens
  misc_feature (61)..(62): /note="This region represents a CpG dinucleotide"
  misc_feature (61)..(61): /note="Nucleotide may be methylated to form 5-methylcytosine"
gcacgggtgctggggactctcttgccagagggttcttggccgcagtgccaaatgacatggcgcagacacagggagtgcagactgtcttcagctccctgtggggcagatactaactttctaaa

SEQ ID NO: 20279 - DNA, 122 bp, Homo sapiens
  misc_feature (61)..(62): /note="This region represents a CpG dinucleotide"
  misc_feature (61)..(61): /note="Nucleotide may be methylated to form 5-methylcytosine"
cagggaggcattgctatacacccattttacagatgaggaaacggaagctcacaagctaaacgtcttgctgaaggcccacagttagtaagtagcagacccagtatttgcaagtacaatggtct

SEQ ID NO: 20280 - DNA, 122 bp, Homo sapiens
  misc_feature (61)..(62): /note="This region represents a CpG dinucleotide"
  misc_feature (61)..(61): /note="Nucleotide may be methylated to form 5-methylcytosine"
tgtggctctgctccttccacaagcacttggggccaggcccatccacctgccatcaggctccgcttcctgaggttacaaatcagagccacccaggctctgaaatgaaatgtgcatttagggcc

SEQ ID NO: 20281 - DNA, 122 bp, Homo sapiens
  misc_feature (61)..(62): /note="This region represents a CpG dinucleotide"
  misc_feature (61)..(61): /note="Nucleotide may be methylated to form 5-methylcytosine"
atcatatttgtcttctcagcatctgactctgtgtttgctaagtgaatgaatgatgcacttcggaccaaatgacgtctgtttaacttgcaactggaaaccaccacaaactgcctgttgactac

SEQ ID NO: 20282 - DNA, 122 bp, Homo sapiens
  misc_feature (61)..(62): /note="This region represents a CpG dinucleotide"
  misc_feature (61)..(61): /note="Nucleotide may be methylated to form 5-methylcytosine"
ccgtgcagggaactgacggagattaaccgtcggcacatcactgagtcagtcaactccatccgtcgggtgagtcaggctcccgggccaccctaccccacctcccttccttcactcatcagaca

SEQ ID NO: 20283 - DNA, 122 bp, Homo sapiens
  misc_feature (61)..(62): /note="This region represents a CpG dinucleotide"
  misc_feature (61)..(61): /note="Nucleotide may be methylated to form 5-methylcytosine"
gccgcggcggcagcaggagcatcgcggccgccgcgcggcagtggcgatatttaaaggggacgcagcctatctctcaggagtggagcgcaaatcgtctcacccaatgcgcatgcgcgaggcgc

SEQ ID NO: 20284 - DNA, 122 bp, Homo sapiens
  misc_feature (61)..(62): /note="This region represents a CpG dinucleotide"
  misc_feature (61)..(61): /note="Nucleotide may be methylated to form 5-methylcytosine"
aagcagatctgttaggtctccatgaggcaggcttgtcagatatccatgataccaggccagcgggtactgtggcaaaatcacactgtgggccaacaagggagataactaaccaattgccttct

SEQ ID NO: 20285 - DNA, 122 bp, Homo sapiens
  misc_feature (61)..(62): /note="This region represents a CpG dinucleotide"
  misc_feature (61)..(61): /note="Nucleotide may be methylated to form 5-methylcytosine"
cagccctatactcatacatctggcagcaataaatcacagaaattcagatttcctgagctacgtttttgttcagtagtgactggcctccctgtagaattgtatgcgcaagtggtctctgatta

SEQ ID NO: 20286 - DNA, 122 bp, Homo sapiens
  misc_feature (61)..(62): /note="This region represents a CpG dinucleotide"
  misc_feature (61)..(61): /note="Nucleotide may be methylated to form 5-methylcytosine"
gagggtttccagaatggctgttgtggcagttgtcacactgtgctcagttccccatgtggtcgtaggtctgatgcaacctttttcttgtctgtcctttagctgacccttttcagccttgccat

SEQ ID NO: 20287 - DNA, 122 bp, Homo sapiens
  misc_feature (61)..(62): /note="This region represents a CpG dinucleotide"
  misc_feature (61)..(61): /note="Nucleotide may be methylated to form 5-methylcytosine"
gacttctggactttgggcagggcagatcctctgactctctggctgcagaacagtttcttccgtgctctggcctgagtgccacagccagggcctctgctctgtacacaggtaagaaggcttca

SEQ ID NO: 20288 - DNA, 122 bp, Homo sapiens
  misc_feature (61)..(62): /note="This region represents a CpG dinucleotide"
  misc_feature (61)..(61): /note="Nucleotide may be methylated to form 5-methylcytosine"
cctactaactgagcagcagaacttcaggtgtcatctagtcagtataagtggaaaactcatcgttgttttttttttgttgtttgtttgtttgtttttttgagacaaagcctctctctgtcatc

SEQ ID NO: 20289 - DNA, 122 bp, Homo sapiens
  misc_feature (61)..(62): /note="This region represents a CpG dinucleotide"
  misc_feature (61)..(61): /note="Nucleotide may be methylated to form 5-methylcytosine"
tctgatggcagtagtcaccccctgtcttagtgatgttgctgctttgttgcagcactcacacgttgtatattttttattttattgataatgtggcttttattccagctataatttatctaact

SEQ ID NO: 20290 - DNA, 122 bp, Homo sapiens
  misc_feature (61)..(62): /note="This region represents a CpG dinucleotide"
  misc_feature (61)..(61): /note="Nucleotide may be methylated to form 5-methylcytosine"
ctgtttaagtcatttgctgtgagcagagtcacaaggcaacactgggaacaacaggcctaacgcatgtcaactcagtgattttcaaactaatacctaataggagggataggaatcccaacttc

SEQ ID NO: 20291 - DNA, 122 bp, Homo sapiens
  misc_feature (61)..(62): /note="This region represents a CpG dinucleotide"
  misc_feature (61)..(61): /note="Nucleotide may be methylated to form 5-methylcytosine"
gggtcacatactgacctcttggcccaatctcaggtcagagcgaaatgtgattggccaggacgcatcccacgcccatcctggagggtagagcactgtgacgggcagccctgccagcaccactg

SEQ ID NO: 20292 - DNA, 122 bp, Homo sapiens
  misc_feature (61)..(62): /note="This region represents a CpG dinucleotide"
  misc_feature (61)..(61): /note="Nucleotide may be methylated to form 5-methylcytosine"
cagtgaactgagaactgccctgcagaattactcataatgcagtacattctccttctcttacggtctcacaaactgcttcctccaaaatggcttttctttataaatccctgttttgtcacact

SEQ ID NO: 20293 - DNA, 122 bp, Homo sapiens
  misc_feature (61)..(62): /note="This region represents a CpG dinucleotide"
  misc_feature (61)..(61): /note="Nucleotide may be methylated to form 5-methylcytosine"
cacaccactggagaaaccatagaccttcttaactgggattaccaacaccttctcttagtacgtattcacatggccttggatgttaggtgactgcctgttcagagaaagtggggagggtgaaa

SEQ ID NO: 20294 - DNA, 122 bp, Homo sapiens
  misc_feature (61)..(62): /note="This region represents a CpG dinucleotide"
  misc_feature (61)..(61): /note="Nucleotide may be methylated to form 5-methylcytosine"
ttacacagtaggcttcttattcaagaaatcacaaaactcagggattaacagccaggatttcgcaactagtttttggggttcaaatctcagctctactggttactagctgtgaataagccctg

SEQ ID NO: 20295 - DNA, 122 bp, Homo sapiens
  misc_feature (61)..(62): /note="This region represents a CpG dinucleotide"
  misc_feature (61)..(61): /note="Nucleotide may be methylated to form 5-methylcytosine"
ctcagtgattgcaagttagtttatcttgctctccttcctgctccacaaaaaaacagtgcacggcctgacctcgcaacactaagagctctgctttaacaggaaacagacacagtcatgggccc

SEQ ID NO: 20296 - DNA, 122 bp, Homo sapiens
  misc_feature (61)..(62): /note="This region represents a CpG dinucleotide"
  misc_feature (61)..(61): /note="Nucleotide may be methylated to form 5-methylcytosine"
agaagggaggataggtgttgtttaattctgagacaccttgcatgctagactgaagttatacggtacaagataagccatggagaactgtgacacattcctgagtacagtcattgttttgatga

SEQ ID NO: 20297 - DNA, 122 bp, Homo sapiens
  misc_feature (61)..(62): /note="This region represents a CpG dinucleotide"
  misc_feature (61)..(61): /note="Nucleotide may be methylated to form 5-methylcytosine"
cagaggaagtgggggagtggtctgcaacctagaagcagctgcacaggcagcagatggtaacggctgcctctcagatggttttttgtcacatagctttttttctttcacattatgaatttttt

SEQ ID NO: 20298 - DNA, 122 bp, Homo sapiens
  misc_feature (61)..(62): /note="This region represents a CpG dinucleotide"
  misc_feature (61)..(61): /note="Nucleotide may be methylated to form 5-methylcytosine"
tgatgactaatgaagccactatttagcattgtatctaggatttccttgccatctgtaaaccgtgacccctcccttcaggcagttttttaacctgaggtggttacctgtttttgtttgctgtc

SEQ ID NO: 20299 - DNA, 122 bp, Homo sapiens
  misc_feature (61)..(62): /note="This region represents a CpG dinucleotide"
  misc_feature (61)..(61): /note="Nucleotide may be methylated to form 5-methylcytosine"
cgtttgctcatgagcacgcaggccaggagctgtttcgggggcagcggacagggctagaggcgcgtttgccaggcagcgcgctgcccctgcgcatcgccagccctgacagacgtgcaccacgg

SEQ ID NO: 20300 - DNA, 122 bp, Homo sapiens
  misc_feature (61)..(62): /note="This region represents a CpG dinucleotide"
  misc_feature (61)..(61): /note="Nucleotide may be methylated to form 5-methylcytosine"
cccagtacttattatgaactgttgggggtgcatcctggtgccagcactgaggaagttaaacgagctttcttctccaagtccaaagaggtacccgtacccctgaggtggggagggggagcagg

SEQ ID NO: 20301 - DNA, 122 bp, Homo sapiens
  misc_feature (61)..(62): /note="This region represents a CpG dinucleotide"
  misc_feature (61)..(61): /note="Nucleotide may be methylated to form 5-methylcytosine"
acaatttaaaaatatttactgagtatccgccatgagccagacaccatgctaaagacttcacgtaaattatctagatgatgtaatcctcacaacaatacaagcaggaaagtgggtactattat

SEQ ID NO: 20302 - DNA, 122 bp, Homo sapiens
  misc_feature (61)..(62): /note="This region represents a CpG dinucleotide"
  misc_feature (61)..(61): /note="Nucleotide may be methylated to form 5-methylcytosine"
agctcgccagctcgggagcttcttgagagcagggtccatggcaggctttgctcaccattgcgtggctccaggctcagtgagtattagttaaatgaacaaaaatgaatgcatgaccatccatg

SEQ ID NO: 20303 - DNA, 122 bp, Homo sapiens
  misc_feature (61)..(62): /note="This region represents a CpG dinucleotide"
  misc_feature (61)..(61): /note="Nucleotide may be methylated to form 5-methylcytosine"
ttagggatgacctctgccctgctgggtgcccttgatgactaacacagcaagtgtgtggaccgccacctgtcctggcctcacccaccttcaccctccatttcttcatgactgcccccgtggct

SEQ ID NO: 20304 - DNA, 122 bp, Homo sapiens
  misc_feature (61)..(62): /note="This region represents a CpG dinucleotide"
  misc_feature (61)..(61): /note="Nucleotide may be methylated to form 5-methylcytosine"
aacttgtgatcctttcttgaagcaaggtaactcacacctcctttacaaggactccggaggcgttctctgatacagtgaaacaggctgagtcagaagcagtaagggacagctgactcctgatc

SEQ ID NO: 20305 - DNA, 122 bp, Homo sapiens
  misc_feature (61)..(62): /note="This region represents a CpG dinucleotide"
  misc_feature (61)..(61): /note="Nucleotide may be methylated to form 5-methylcytosine"
agaaagaaaaccatggatcagatcttgctcctgttcaagataaaaactacatctgtgttgcgtgtgaaaaataagtaaataaataaatatgacatgcataggaaagaagcagaagtagtaca

SEQ ID NO: 20306 - DNA, 122 bp, Homo sapiens
  misc_feature (61)..(62): /note="This region represents a CpG dinucleotide"
  misc_feature (61)..(61): /note="Nucleotide may be methylated to form 5-methylcytosine"
aaatactgtttcaatttctttactaataataagcctattcacacttcctttttctatccccgtttctttttccttcctctcttttccctccctctcttcctttcctccccttgcctcccctt

SEQ ID NO: 20307 - DNA, 122 bp, Homo sapiens
  misc_feature (61)..(62): /note="This region represents a CpG dinucleotide"
  misc_feature (61)..(61): /note="Nucleotide may be methylated to form 5-methylcytosine"
ccccaggcaagatgtgggtttgttttgggaaagggctgttattgtctttgttctaaactgcggattataaactaagtgcctcccaaagtcagttcagctaatgcccaggaatgaataatgac

SEQ ID NO: 20308 - DNA, 122 bp, Homo sapiens
  misc_feature (61)..(62): /note="This region represents a CpG dinucleotide"
  misc_feature (61)..(61): /note="Nucleotide may be methylated to form 5-methylcytosine"
gtgttatctcctcactctgtctttagggcctgcctttaactaagcaggagctcaagacagcgtaagtttcaaagacattatgatgcttttacagaagtccctttcaaaaacaacttctgtat

SEQ ID NO: 20309 - DNA, 122 bp, Homo sapiens
  misc_feature (61)..(62): /note="This region represents a CpG dinucleotide"
  misc_feature (61)..(61): /note="Nucleotide may be methylated to form 5-methylcytosine"
tggggccctctgaaaccaaatgcacaaatactgattgaaagtccactgcatgtacctgcacgtacactgttgggtgatttctttgagatcaagatggctgtaataaacagcttaaaggctta

SEQ ID NO: 20310 - DNA, 122 bp, Homo sapiens
  misc_feature (61)..(62): /note="This region represents a CpG dinucleotide"
  misc_feature (61)..(61): /note="Nucleotide may be methylated to form 5-methylcytosine"
ttgatgttgaaattactttaaagacctgttgattatgtggtattagggccattgtgacctcgctgtagctaagatcagtccactgcagcaggagtttcaagaacagcagcacaaaaataatg

SEQ ID NO: 20311 - DNA, 122 bp, Homo sapiens
  misc_feature (61)..(62): /note="This region represents a CpG dinucleotide"
  misc_feature (61)..(61): /note="Nucleotide may be methylated to form 5-methylcytosine"
gagtaatgctgctatgttggctcttatgagtaatgctgctgtgttggctgttatgagtaacgctgctatggacacaggtgtacacatgtctactggagtccctgctttaattttttggggtc

SEQ ID NO: 20312 - DNA, 122 bp, Homo sapiens
  misc_feature (61)..(62): /note="This region represents a CpG dinucleotide"
  misc_feature (61)..(61): /note="Nucleotide may be methylated to form 5-methylcytosine"
acagtgctcacccatttgttacatggcatttaaggcagggatctggttcctgtcacaacacgtgtatgtgtgttattagcaaaaggtactcaggaagatgaaaggtcctatacagtgaagcc

SEQ ID NO: 20313 - DNA, 122 bp, Homo sapiens
  misc_feature (61)..(62): /note="This region represents a CpG dinucleotide"
  misc_feature (61)..(61): /note="Nucleotide may be methylated to form 5-methylcytosine"
gtctgtggagtaatcccttaccaaaagccagagtctgactggccatcaggagaggagccacggcttccagggagctggagctgcagagtcaagaagtttcataatttctggggttggaacat

SEQ ID NO: 20314 - DNA, 122 bp, Homo sapiens
  misc_feature (61)..(62): /note="This region represents a CpG dinucleotide"
  misc_feature (61)..(61): /note="Nucleotide may be methylated to form 5-methylcytosine"
aagcaagatagagaaatgagcaagggaggtaatggcactgcgcccatggagaggggccgacggaaaatgactcataagcatggttgggactgtccttgggaagaagttgggagactctaaga

SEQ ID NO: 20315 - DNA, 122 bp, Homo sapiens
  misc_feature (61)..(62): /note="This region represents a CpG dinucleotide"
  misc_feature (61)..(61): /note="Nucleotide may be methylated to form 5-methylcytosine"
gcaagacagacagctttgattttctctctttctctgagcgtgagcaagccagcacaggagcgcctatatagcatccgcagggcagttataccttctttaaacaatagtggccctgagcccag

SEQ ID NO: 20316 - DNA, 122 bp, Homo sapiens
  misc_feature (61)..(62): /note="This region represents a CpG dinucleotide"
  misc_feature (61)..(61): /note="Nucleotide may be methylated to form 5-methylcytosine"
tgttgctagaaggcagtggaacataggtatttaaaaaaaaaaaaaagcagaagaagcagccgttaatcccgccaggcttctgggcactggagtagttgtggatgacaaaagttaattagaaa

SEQ ID NO: 20317 - DNA, 122 bp, Homo sapiens
  misc_feature (61)..(62): /note="This region represents a CpG dinucleotide"
  misc_feature (61)..(61): /note="Nucleotide may be methylated to form 5-methylcytosine"
agagattgaggatttggcctgaagtgctagaagtcactatccctgcaacccaatctcagtcggtggcacctatgagaaaacatgctttcaaatctctcttggccggatatggtgactcacac

SEQ ID NO: 20318 - DNA, 122 bp, Homo sapiens
  misc_feature (61)..(62): /note="This region represents a CpG dinucleotide"
  misc_feature (61)..(61): /note="Nucleotide may be methylated to form 5-methylcytosine"
taatataaatatcttgtgctgtatgtttgttttcccggaatgtacttgttaaaaattaagcgctgactcacagaaacatctgggcaagagtgtggatgactcaggacaaactcatcactgtt

SEQ ID NO: 20319 - DNA, 122 bp, Homo sapiens
  misc_feature (61)..(62): /note="This region represents a CpG dinucleotide"
  misc_feature (61)..(61): /note="Nucleotide may be methylated to form 5-methylcytosine"
tggaattcaaatatactaatttgattctctgtgtcccatttctgatttgaacagagccgccgattgttacctggtatgcaattttagatccctgcattcctgttgttcctaacaacggcttg

SEQ ID NO: 20320 - DNA, 122 bp, Homo sapiens
  misc_feature (61)..(62): /note="This region represents a CpG dinucleotide"
  misc_feature (61)..(61): /note="Nucleotide may be methylated to form 5-methylcytosine"
gctggtcgaggactgggttccgtggctgctgtttcttaatcactcagcttaaaaagctgtcgagtgctgtgtaagtcatcaccccaaatgtctcttggaaaattccacctgtgacattctga

SEQ ID NO: 20321 - DNA, 122 bp, Homo sapiens
  misc_feature (61)..(62): /note="This region represents a CpG dinucleotide"
  misc_feature (61)..(61): /note="Nucleotide may be methylated to form 5-methylcytosine"
taacacgaatgacaagtgggtgattttcaagaagcgcccggtccctctagagaatgcgtccgaatatcagcggagccgactgcgtatgcctccggatgcccatctataaactctcttgcttg

SEQ ID NO: 20322 - DNA, 122 bp, Homo sapiens
  misc_feature (61)..(62): /note="This region represents a CpG dinucleotide"
  misc_feature (61)..(61): /note="Nucleotide may be methylated to form 5-methylcytosine"
agtagccaaggggcagcgtgttggggctagggtggagcacatggctgtacctggtgttatcgatccagcagtctaccccaaggggtaggaacatgttgagatccagccagatggtgaagaag

SEQ ID NO: 20323 - DNA, 122 bp, Homo sapiens
  misc_feature (61)..(62): /note="This region represents a CpG dinucleotide"
  misc_feature (61)..(61): /note="Nucleotide may be methylated to form 5-methylcytosine"
aatgatttggtacacttgggtaaatatatgtatagcctagtgaaaggtttcagtttggaacgtgacgtattatgtcaagtgacataagatttgctgtgttgactttataacctgtgtttatg

SEQ ID NO: 20324 - DNA, 122 bp, Homo sapiens
  misc_feature (61)..(62): /note="This region represents a CpG dinucleotide"
  misc_feature (61)..(61): /note="Nucleotide may be methylated to form 5-methylcytosine"
gtctaggccagtcggggtcaccaaaaaaaatccaccaaaaaacacccaagaagggagaagcggtcaccccccacgtgctggaatgacagctttttacttgctaggcagttggaccttttccg

SEQ ID NO: 20325 - DNA, 122 bp, Homo sapiens
  misc_feature (61)..(62): /note="This region represents a CpG dinucleotide"
  misc_feature (61)..(61): /note="Nucleotide may be methylated to form 5-methylcytosine"
ggtgtccttaaacttagtttttcatttccagaagccttctcgctgtaccttgtggtcacacgtggagggctacgatacctcctcatctcaccagagagtgggaagtttcaaataagaacatg

SEQ ID NO: 20326 - DNA, 122 bp, Homo sapiens
  misc_feature (61)..(62): /note="This region represents a CpG dinucleotide"
  misc_feature (61)..(61): /note="Nucleotide may be methylated to form 5-methylcytosine"
agatgttttgtctgtaaattctcccaagaacttttccagttttgacgtgaaataaaccttcgaaaatcagaagagtatattaataccacttctgtggggcctcaggagagctgagtcaggtg

SEQ ID NO: 20327 - DNA, 122 bp, Homo sapiens
  misc_feature (61)..(62): /note="This region represents a CpG dinucleotide"
  misc_feature (61)..(61): /note="Nucleotide may be methylated to form 5-methylcytosine"
ttatgtgctaaaccattagctctgactcaaatccagcttcctagtctctcatcagccctccgcctgggctaatgagcagaggtgaaatcactggataagtggctctcaaagtgtggccctca

SEQ ID NO: 20328 - DNA, 122 bp, Homo sapiens
  misc_feature (61)..(62): /note="This region represents a CpG dinucleotide"
  misc_feature (61)..(61): /note="Nucleotide may be methylated to form 5-methylcytosine"
gcattcatggcagcagtgcccgagagaggggtggctgttctggatgccagggggaagcggcgggacttttaaagagggcaggttactgagtaacctggaagcctctgtcagtctcatctgct

SEQ ID NO: 20329 - DNA, 122 bp, Homo sapiens
  misc_feature (61)..(62): /note="This region represents a CpG dinucleotide"
  misc_feature (61)..(61): /note="Nucleotide may be methylated to form 5-methylcytosine"
ctggttcctgttcctgggcatccccaaggagaaggccccaagtcgtgtgtccactgcagacgtcatgactcacaggactgggattgtggctaaaaggagtctcaatggttcagctcctctcc

SEQ ID NO: 20330 - DNA, 122 bp, Homo sapiens
  misc_feature (61)..(62): /note="This region represents a CpG dinucleotide"
  misc_feature (61)..(61): /note="Nucleotide may be methylated to form 5-methylcytosine"
tgcctgctcagtgcagacagggtgcccgacgtgtctgctcagtgcagacagggtgcctgacgtgtcaatgttggacatctcaaaaggtggcatacggtcccagcagagagctgcagtggggt

SEQ ID NO: 20331 - DNA, 122 bp, Homo sapiens
  misc_feature (61)..(62): /note="This region represents a CpG dinucleotide"
  misc_feature (61)..(61): /note="Nucleotide may be methylated to form 5-methylcytosine"
ggtcccataagattataacagaactgaaaaattcctatcacctagcgacattgtagtaaacgtaaagttgtagagcaacaccactcgtgtttgtggctacataggtgtaaacctactgtgct

SEQ ID NO: 20332 - DNA, 122 bp, Homo sapiens
  misc_feature (61)..(62): /note="This region represents a CpG dinucleotide"
  misc_feature (61)..(61): /note="Nucleotide may be methylated to form 5-methylcytosine"
caaggcttcacagaaaaagaaaatcaacacagcacattgcactgaaaaacaatcttcagccggtccagattatggagtactaggaggactccatatttgaaatgtttgcccttcaaagagaa

SEQ ID NO: 20333 - DNA, 122 bp, Homo sapiens
  misc_feature (61)..(62): /note="This region represents a CpG dinucleotide"
  misc_feature (61)..(61): /note="Nucleotide may be methylated to form 5-methylcytosine"
cagatgacccaatatcccatgacaatgtatgcttctaagctaattacagtcatgctttcacgtacttgcacactaaaataccaaggataggtgtttttttttttttgatggagcttcacttt

SEQ ID NO: 20334 - DNA, 122 bp, Homo sapiens
  misc_feature (61)..(62): /note="This region represents a CpG dinucleotide"
  misc_feature (61)..(61): /note="Nucleotide may be methylated to form 5-methylcytosine"
aagtggagacatagtaggaggcagtgtttatgtgagtcatgcccaagtaagcacagtggacgctcacagagcccagagaggatctgtgaaggaatccacgcttgtcgcaccaggcagggcac

SEQ ID NO: 20335 - DNA, 122 bp, Homo sapiens
  misc_feature (61)..(62): /note="This region represents a CpG dinucleotide"
  misc_feature (61)..(61): /note="Nucleotide may be methylated to form 5-methylcytosine"
agtcaccctactgcaagctcagatgggaagaacttttgtggctcagcttccctgatcagacgacacaggcacccaatgactctagcactcagtgacaaggaagacaagtagctttcccagcc

SEQ ID NO: 20336 - DNA, 122 bp, Homo sapiens
  misc_feature (61)..(62): /note="This region represents a CpG dinucleotide"
  misc_feature (61)..(61): /note="Nucleotide may be methylated to form 5-methylcytosine"
tgtcactaaccccatcaccatcaaatccaatagatggggcaggttttgactttccgagcccgtcccagacatttcactttcaaggaaacacattaaattgcatgaatgtgaagaattacaac

SEQ ID NO: 20337 - DNA, 122 bp, Homo sapiens
  misc_feature (61)..(62): /note="This region represents a CpG dinucleotide"
  misc_feature (61)..(61): /note="Nucleotide may be methylated to form 5-methylcytosine"
ggtggtgtaagcagagtttactgtagaaaccaagaaacaaaagacaacatgaccagttttcgaacttggcgtgctctgaattattaaaaataatcttatagtgtccgcccagccctctcaag

SEQ ID NO: 20338 - DNA, 122 bp, Homo sapiens
  misc_feature (61)..(62): /note="This region represents a CpG dinucleotide"
  misc_feature (61)..(61): /note="Nucleotide may be methylated to form 5-methylcytosine"
tttccttctctgtagcacacacgactataatttcccgtgactatttatggtctggatagccgttctctaacttccttttttttttttttaatgtcaacggaatacgtgtttctttaatggaa

SEQ ID NO: 20339 - DNA, 122 bp, Homo sapiens
  misc_feature (61)..(62): /note="This region represents a CpG dinucleotide"
  misc_feature (61)..(61): /note="Nucleotide may be methylated to form 5-methylcytosine"
ctggagagtgggaggctctgcagcgggcccggacacaggtgagcccaggcacgccctcaccgccccctctcgacccacagggcttccggcccatcgccaagccggcctacagcccagcctcc

SEQ ID NO: 20340 - DNA, 122 bp, Homo sapiens
  misc_feature (61)..(62): /note="This region represents a CpG dinucleotide"
  misc_feature (61)..(61): /note="Nucleotide may be methylated to form 5-methylcytosine"
gatgttggcagcaaactgtcagacaacatttcctgctgtggattcaggtcactaagccaacgcatgcaaaatgaacgcagaaaaggaagtctaagaaggaggaatgtttgaaacagacacgt

SEQ ID NO: 20341 - DNA, 122 bp, Homo sapiens
  misc_feature (61)..(62): /note="This region represents a CpG dinucleotide"
  misc_feature (61)..(61): /note="Nucleotide may be methylated to form 5-methylcytosine"
agctcaagttcaaatgtctctcatccttgactttgatgtaaaaacatgtcatatttcactcgcggattgcatgtgaataagcaatatcagttctcagagaatggaaccacagcgaaagggaa

SEQ ID NO: 20342 - DNA, 122 bp, Homo sapiens
  misc_feature (61)..(62): /note="This region represents a CpG dinucleotide"
  misc_feature (61)..(61): /note="Nucleotide may be methylated to form 5-methylcytosine"
agagcggaggggactgtgcagtcctgtgtgtgggttaccggccccgtgggcttcactgtgcgggttgtgtgtctgggagcaggtggggagaaccggatggagggctctagaagcagctacac

SEQ ID NO: 20343 - DNA, 122 bp, Homo sapiens
  misc_feature (61)..(62): /note="This region represents a CpG dinucleotide"
  misc_feature (61)..(61): /note="Nucleotide may be methylated to form 5-methylcytosine"
atatgcaggttcaatcacttgctagctatctgatcatggccctgttttccttctctgttgcgtgagatcataatacttgtctttctgagctcccagggctattctgaggatcatgaaagtat

SEQ ID NO: 20344 - DNA, 122 bp, Homo sapiens
  misc_feature (61)..(62): /note="This region represents a CpG dinucleotide"
  misc_feature (61)..(61): /note="Nucleotide may be methylated to form 5-methylcytosine"
aaatgtttatatgagtacacgtataatgcattccaggaacatattttttaatgtgattgtcggcaaacagttatgaagtggcattatttcttcatgggccttcagggtagactcttaaaaat

SEQ ID NO: 20345 - DNA, 122 bp, Homo sapiens
  misc_feature (61)..(62): /note="This region represents a CpG dinucleotide"
  misc_feature (61)..(61): /note="Nucleotide may be methylated to form 5-methylcytosine"
ttattattattaattataatccagctgaggctcaatgaatacttactatgtgccagacagcgtggtaagcactataatttgcacagcactgttgagagcgaagctaacaaaagcagaggcta

SEQ ID NO: 20346 - DNA, 122 bp, Homo sapiens
  misc_feature (61)..(62): /note="This region represents a CpG dinucleotide"
  misc_feature (61)..(61): /note="Nucleotide may be methylated to form 5-methylcytosine"
gaacacccaggctcagaggcatggcaggagctggctgtcagggcccttatcagcaggccccgcctctcctccagtttcagctcagttagccctggaaggggaaagaccttgctgggggcaga

SEQ ID NO: 20347 - DNA, 122 bp, Homo sapiens
  misc_feature (61)..(62): /note="This region represents a CpG dinucleotide"
  misc_feature (61)..(61): /note="Nucleotide may be methylated to form 5-methylcytosine"
aactaaaaatttggaatttgggggactgctgaagtgggtgtatgtctacctttcattttacgtctgagactaagaaaagtagagatgagaaaagcagagaatcttctatgtagaagcatgta

SEQ ID NO: 20348 - DNA, 122 bp, Homo sapiens
  misc_feature (61)..(62): /note="This region represents a CpG dinucleotide"
  misc_feature (61)..(61): /note="Nucleotide may be methylated to form 5-methylcytosine"
ctgcggcattccctcgctcctcctgtttattcagttgtgcagatattggcagagtcaggccgccccggactcatggtgacccagcgtctggtctggtagttatgaaatctcacatggtttat

SEQ ID NO: 20349 - DNA, 122 bp, Homo sapiens
  misc_feature (61)..(62): /note="This region represents a CpG dinucleotide"
  misc_feature (61)..(61): /note="Nucleotide may be methylated to form 5-methylcytosine"
ggagtgaaacagtgagagatcctgtttgtagttctgtgcagacaaacccagaaaccagaacgcagacacaccaggacgcaacaggaaaccacaaaggcctgagatctttcaatgtaaatagg

SEQ ID NO: 20350 - DNA, 122 bp, Homo sapiens
  misc_feature (61)..(62): /note="This region represents a CpG dinucleotide"
  misc_feature (61)..(61): /note="Nucleotide may be methylated to form 5-methylcytosine"
ccactgatgtgatgcaatggaatgtacatggcatcactaaagtcttcttgcaccactccccgcaacaggaaaaaaaaaaaaaaaaaactaaatctaattgagcctatagatcaaacactgtg

SEQ ID NO: 20351 - DNA, 122 bp, Homo sapiens
  misc_feature (61)..(62): /note="This region represents a CpG dinucleotide"
  misc_feature (61)..(61): /note="Nucleotide may be methylated to form 5-methylcytosine"
catactttgggggccagtagaatttgctgcgggagagctcactctagaaggggttctcaacgtctggcttccagacgagcagcaacagcattcactgggaacttgcataagtggaaattagg

SEQ ID NO: 20352 - DNA, 122 bp, Homo sapiens
  misc_feature (61)..(62): /note="This region represents a CpG dinucleotide"
  misc_feature (61)..(61): /note="Nucleotide may be methylated to form 5-methylcytosine"
atcaaaatgagttcagcataatattcattcatttgttcattcattcaagaaatgttctgacgtgtcctgggccctgaggtagggcaaaagataaactaaagtaaatgtgacacatttcctac

SEQ ID NO: 20353 - DNA, 122 bp, Homo sapiens
  misc_feature (61)..(62): /note="This region represents a CpG dinucleotide"
  misc_feature (61)..(61): /note="Nucleotide may be methylated to form 5-methylcytosine"
tacattagataaccccctaagactctgcagttgcctgattatgggccagtagcactgtagcgtaatattttacttgctctgtctcttatgtgactctaagcccagtgaaggaagaggccaca

SEQ ID NO: 20354 - DNA, 122 bp, Homo sapiens
  misc_feature (61)..(62): /note="This region represents a CpG dinucleotide"
  misc_feature (61)..(61): /note="Nucleotide may be methylated to form 5-methylcytosine"
caaagcagaatgcagaaagcggcagcactgggagcgtgtggggagggacggggcagccggcggaggctgagccaacatgccgtggttcaggcccacacctcgtggaaggcagaaggcgagtg

SEQ ID NO: 20355 - DNA, 122 bp, Homo sapiens
  misc_feature (61)..(62): /note="This region represents a CpG dinucleotide"
  misc_feature (61)..(61): /note="Nucleotide may be methylated to form 5-methylcytosine"
tggatataaaaagaaatttgacatgttaggcaatcttaaaaaatcacaggtgattgacaccggaaggttattgagaaatgcaaggtcccagtctaccactaatggcagcacccatgaaggac

SEQ ID NO: 20356 - DNA, 122 bp, Homo sapiens
  misc_feature (61)..(62): /note="This region represents a CpG dinucleotide"
  misc_feature (61)..(61): /note="Nucleotide may be methylated to form 5-methylcytosine"
attactgacaccttgagaacatccaccaagttgaggatggtgaaagatacctaagtcactcgaggaaagcaggttggtacaaagtagaaaaattacaccaggttggagaacaagaccagcag

SEQ ID NO: 20357 - DNA, 122 bp, Homo sapiens
  misc_feature (61)..(62): /note="This region represents a CpG dinucleotide"
  misc_feature (61)..(61): /note="Nucleotide may be methylated to form 5-methylcytosine"
acgtgggggaagaagggggttacgccatcaagtcctgaagcccgtcggaccacccatcgccgcctgcgcagacccaaatcttggtcccgccgtaaggtgccgcagtcccgaatgttccagaa

SEQ ID NO: 20358 - DNA, 122 bp, Homo sapiens
  misc_feature (61)..(62): /note="This region represents a CpG dinucleotide"
  misc_feature (61)..(61): /note="Nucleotide may be methylated to form 5-methylcytosine"
attagtcaggtaggggtgcactggagcataaattgcacaacagagatggttcctccttgacgcaaagcattggtctatcataccttagcatcagttagtcagtcattagctgtaggctgtgg

SEQ ID NO: 20359 - DNA, 122 bp, Homo sapiens
  misc_feature (61)..(62): /note="This region represents a CpG dinucleotide"
  misc_feature (61)..(61): /note="Nucleotide may be methylated to form 5-methylcytosine"
tagactaataggctgagctctggtttaacttaaacttgagtggtctggagtgaactcattcgttctacaccagttcctcacagaatattatatattttttatcattattattgagattttac

SEQ ID NO: 20360 - DNA, 122 bp, Homo sapiens
  misc_feature (61)..(62): /note="This region represents a CpG dinucleotide"
  misc_feature (61)..(61): /note="Nucleotide may be methylated to form 5-methylcytosine"
gactcctgacatagatgggtgccagtacaactgcagttcctcacagctgtggcacagctacgctcccatctggtaactgactccatccttcctccatcacttgtccttccctctacctggag

SEQ ID NO: 20361 - DNA, 122 bp, Homo sapiens
  misc_feature (61)..(62): /note="This region represents a CpG dinucleotide"
  misc_feature (61)..(61): /note="Nucleotide may be methylated to form 5-methylcytosine"
ccttcccccgaaagcctcaaagttctgcaaactcacagccaagcaaaacgcagctgcagtcgagccagcctcgaaaggtcttacaactttctgcagtggccagcttgttctctgtttccatg

SEQ ID NO: 20362 - DNA, 122 bp, Homo sapiens
  misc_feature (61)..(62): /note="This region represents a CpG dinucleotide"
  misc_feature (61)..(61): /note="Nucleotide may be methylated to form 5-methylcytosine"
tcctgttcccacccacaagccgctctcactactactttagttatgatagcacagtgttcacggaagttttaaaaatcaaaaaatatttccccttttgtgtttttgtgagagaaggaaaaata

SEQ ID NO: 20363 - DNA, 122 bp, Homo sapiens
  misc_feature (61)..(62): /note="This region represents a CpG dinucleotide"
  misc_feature (61)..(61): /note="Nucleotide may be methylated to form 5-methylcytosine"
ctgcctctgctctagccctcatacttgaagtatttgtttacgtctgttgtttctgaactgcgagtccatccagggctgggcccaacccttattcatctttataggtttcccaggcctgtcac

SEQ ID NO: 20364 - DNA, 122 bp, Homo sapiens
  misc_feature (61)..(62): /note="This region represents a CpG dinucleotide"
  misc_feature (61)..(61): /note="Nucleotide may be methylated to form 5-methylcytosine"
aggatttctcaatctagatcaaaaacacatttgccgacttgacagcaacaaaaaccaaaccgcccagtttaaaaatgggcaaaggacttgaatagacatttatccaaagaagatacataaat

SEQ ID NO: 20365 - DNA, 122 bp, Homo sapiens
  misc_feature (61)..(62): /note="This region represents a CpG dinucleotide"
  misc_feature (61)..(61): /note="Nucleotide may be methylated to form 5-methylcytosine"
tcagagccaccagggacctgggccacgtgtccctttccatgaccatggggtgtgtgactgcgggaggctgaaagtgtcagcactgtgacctggaaatatatgcctggattggggaggtggac

SEQ ID NO: 20366 - DNA, 122 bp, Homo sapiens
  misc_feature (61)..(62): /note="This region represents a CpG dinucleotide"
  misc_feature (61)..(61): /note="Nucleotide may be methylated to form 5-methylcytosine"
ttgtttcctgacttgccctgatgtaggccaccctgaaaatcaggaactccaacttctacacggtggcagtgaccagcctgtccagccagattcagtacatgaacacagtggtcagtacatat

SEQ ID NO: 20367 - DNA, 122 bp, Homo sapiens
  misc_feature (61)..(62): /note="This region represents a CpG dinucleotide"
  misc_feature (61)..(61): /note="Nucleotide may be methylated to form 5-methylcytosine"
gacgtggttgccttttcattttgtcctgccccttggcttgttctttctgatccaacacagcggagtctgcttgttcattggccaaatgtcaacaagtcaccataaagggctgccaaggaaaa

SEQ ID NO: 20368 - DNA, 122 bp, Homo sapiens
  misc_feature (61)..(62): /note="This region represents a CpG dinucleotide"
  misc_feature (61)..(61): /note="Nucleotide may be methylated to form 5-methylcytosine"
tattgtgcttctgacaatataactttggtcagttcattaaatccacacctaagagaaatacgtagtattcagggattaacatttgttggaaattttggttccctggagggagaaggaatatt

SEQ ID NO: 20369 - DNA, 122 bp, Homo sapiens
  misc_feature (61)..(62): /note="This region represents a CpG dinucleotide"
  misc_feature (61)..(61): /note="Nucleotide may be methylated to form 5-methylcytosine"
acgacaccacttcctctcacccagtgtgtccaagctgatcaaactgggtgtgtcattgttcgcacacttgctgggccatggggcaggcaaggagcggctccttaaaccacaccaaaggtttg

SEQ ID NO: 20370 - DNA, 122 bp, Homo sapiens
  misc_feature (61)..(62): /note="This region represents a CpG dinucleotide"
  misc_feature (61)..(61): /note="Nucleotide may be methylated to form 5-methylcytosine"
ctgctgatttggttgtaatgaaacaaccttgcccagcccacattatttcatctcaatatgcgttagcatgactgctacagttctccaagttctgggctgcctcagggaaaaagtctgcccat

SEQ ID NO: 20371 - DNA, 122 bp, Homo sapiens
  misc_feature (61)..(62): /note="This region represents a CpG dinucleotide"
  misc_feature (61)..(61): /note="Nucleotide may be methylated to form 5-methylcytosine"
aaagtcatactcttttagttttcatctgttatggtcatggggaaaatatttctttgaattcggtcctgaacccatctgagacttggggaacattagcagcttctcagtgcatactttctagg

SEQ ID NO: 20372 - DNA, 122 bp, Homo sapiens
  misc_feature (61)..(62): /note="This region represents a CpG dinucleotide"
  misc_feature (61)..(61): /note="Nucleotide may be methylated to form 5-methylcytosine"
gcctgggagccacacagaacatgtctattcatgctgttgtggagtgtgtcacccagctggcgtggcacctcacacactcaccgtgccctctccccggatacctctgctctgccggtccctcc

SEQ ID NO: 20373 - DNA, 122 bp, Homo sapiens
  misc_feature (61)..(62): /note="This region represents a CpG dinucleotide"
  misc_feature (61)..(61): /note="Nucleotide may be methylated to form 5-methylcytosine"
gggctgaggcctcagattctgcatttctaacaagttcctgtcacgccagcctctctggcccgtggatcacactgtgagggccaggtgtggtggtgcatgactataatccaaacactttgtga

SEQ ID NO: 20374 - DNA, 122 bp, Homo sapiens
  misc_feature (61)..(62): /note="This region represents a CpG dinucleotide"
  misc_feature (61)..(61): /note="Nucleotide may be methylated to form 5-methylcytosine"
taaatgagttgaacaaaagagcaccttggtgcacttatcctctgcagtgataggtaggggcgatgagatttagaagacaaaccttttatgtagtgaaagagcatgcattttttttccgtggg

SEQ ID NO: 20375 - DNA, 122 bp, Homo sapiens
  misc_feature (61)..(62): /note="This region represents a CpG dinucleotide"
  misc_feature (61)..(61): /note="Nucleotide may be methylated to form 5-methylcytosine"
caatactccttacagtaagactaaaatattcccccccgccaacttttccaataatcaccacgtggggagcagagattattttaaaagaggtacatggtaggaaaattttcctagcagaacag

SEQ ID NO: 20376 - DNA, 122 bp, Homo sapiens
  misc_feature (61)..(62): /note="This region represents a CpG dinucleotide"
  misc_feature (61)..(61): /note="Nucleotide may be methylated to form 5-methylcytosine"
gccacacacttcatcaagagaacagcaaagggggaaatccgcccccaccaggcctctccccggacatatggggattaaaattcaacaggagatttgggaggggacacagagccaaaaccata

SEQ ID NO: 20377 - DNA, 122 bp, Homo sapiens
  misc_feature (61)..(62): /note="This region represents a CpG dinucleotide"
  misc_feature (61)..(61): /note="Nucleotide may be methylated to form 5-methylcytosine"
ccccaggcacctcaaagggtcctcggtgttcaacaacaggaagtgctggcaggcttccctcgctagggaactgaaagtggtgacaacagaggatgtgttcttcaggctatcagataaagccc

SEQ ID NO: 20378 - DNA, 122 bp, Homo sapiens
  misc_feature (61)..(62): /note="This region represents a CpG dinucleotide"
  misc_feature (61)..(61): /note="Nucleotide may be methylated to form 5-methylcytosine"
tacacatcatttctttcatttttggcctgtggataggagcaaagctgtattcagactaaccgggcccaggtacaaacaacctgtagctcattctacctctgattcatctcttgaattctgtt

SEQ ID NO: 20379 - DNA, 122 bp, Homo sapiens
  misc_feature (61)..(62): /note="This region represents a CpG dinucleotide"
  misc_feature (61)..(61): /note="Nucleotide may be methylated to form 5-methylcytosine"
cacaggcattacttatgaatatgtgaaatatgaatactcattcccttccataaagacacacgcccagatctggaattcccctgaaccacctggaagatcagggagataaaagttcatctcca

SEQ ID NO: 20380 - DNA, 122 bp, Homo sapiens
  misc_feature (61)..(62): /note="This region represents a CpG dinucleotide"
  misc_feature (61)..(61): /note="Nucleotide may be methylated to form 5-methylcytosine"
tggttctacatctaaatctttagctagatttaccaattctcatatagcacgtaagaaatccgggctatgaaacaaaaggaaataagcacattcacctttcctgctatccctcatttcctcca

SEQ ID NO: 20381 - DNA, 122 bp, Homo sapiens
  misc_feature (61)..(62): /note="This region represents a CpG dinucleotide"
  misc_feature (61)..(61): /note="Nucleotide may be methylated to form 5-methylcytosine"
ctgaaataactgtcacccgcttccacccctgaccatgcccgccagtttccttggccctgacgtgggtcaggcaacccacattgctcaagatccagggagcagcacttcaccggctgggagat

SEQ ID NO: 20382 - DNA, 122 bp, Homo sapiens
  misc_feature (61)..(62): /note="This region represents a CpG dinucleotide"
  misc_feature (61)..(61): /note="Nucleotide may be methylated to form 5-methylcytosine"
ccaagatctgttatagtgagttgtttctcctagttgtcagatagcagagaaaaaaatgtacgcccgcagaatccagcctttgatccagcgttcctggagaaccctcactcatttatgaagcg

SEQ ID NO: 20383 - DNA, 122 bp, Homo sapiens
  misc_feature (61)..(62): /note="This region represents a CpG dinucleotide"
  misc_feature (61)..(61): /note="Nucleotide may be methylated to form 5-methylcytosine"
ttggatttgcagtgacctgcatttgtgatttcagactttgttctttaggtttctccccatcgttgctgcacatttctctcctctgccctggctctctcttctctctacctttgaggctccat

SEQ ID NO: 20384 - DNA, 122 bp, Homo sapiens
  misc_feature (61)..(62): /note="This region represents a CpG dinucleotide"
  misc_feature (61)..(61): /note="Nucleotide may be methylated to form 5-methylcytosine"
tgaacttttataatcagtttaaattactgggtttcacagcaaccagttatcctaaaatggcggccacacctatcatgaaagagctatgggcttaaggacttaccgatgtgcggctgatgagc

SEQ ID NO: 20385 - DNA, 122 bp, Homo sapiens
  misc_feature (61)..(62): /note="This region represents a CpG dinucleotide"
  misc_feature (61)..(61): /note="Nucleotide may be methylated to form 5-methylcytosine"
attaaaagtatagatgctacttcatcagtttggttttgtttaactattaataagaaaacacgtagtgaagaaatagtacttaacaatcatcctggccgggcatggttgctcacacatataat

SEQ ID NO: 20386 - DNA, 122 bp, Homo sapiens
  misc_feature (61)..(62): /note="This region represents a CpG dinucleotide"
  misc_feature (61)..(61): /note="Nucleotide may be methylated to form 5-methylcytosine"
cccaccgccttgcgtacgcacaggggcccggggacggggtggccgggaagggcaggggaacggctgccccagcccgcgccgggcgtgcatacacaacgcacccacactcacacacacacaca

SEQ ID NO: 20387 - DNA, 122 bp, Homo sapiens
  misc_feature (61)..(62): /note="This region represents a CpG dinucleotide"
  misc_feature (61)..(61): /note="Nucleotide may be methylated to form 5-methylcytosine"
agggttaggggtgggggaggtactgtaaaataggtgttattgtgccaaatgcttgagttacggctgttactccacaggagaaataccatgatttaattctggtgacttggcattagcctcta

SEQ ID NO: 20388 - DNA, 122 bp, Homo sapiens
  misc_feature (61)..(62): /note="This region represents a CpG dinucleotide"
  misc_feature (61)..(61): /note="Nucleotide may be methylated to form 5-methylcytosine"
ggtggataaagaacctgcctagaatattagcagcagaagtataattagaagctacctcttcgattaaaacaaacattcacaaatagacacttgggattttagtcaccactatttcaaagtag

SEQ ID NO: 20389 - DNA, 122 bp, Homo sapiens
  misc_feature (61)..(62): /note="This region represents a CpG dinucleotide"
  misc_feature (61)..(61): /note="Nucleotide may be methylated to form 5-methylcytosine"
tacttcagctattccttagatgagcaatttgttgaatgtgattatggttttgaggactctcgccactcttttgggtgtgttccagtttgtcagtgtcatctttaatgtggcatctggagctg

SEQ ID NO: 20390 - DNA, 122 bp, Homo sapiens
  misc_feature (61)..(62): /note="This region represents a CpG dinucleotide"
  misc_feature (61)..(61): /note="Nucleotide may be methylated to form 5-methylcytosine"
gagtcatagtcctggttgcttggccactgtgtctggacaaagagctgccgcagcaagtgccgctgctgggcagtctttttgcagctcactttgcctgggagctgctctgccagtttgtttga

SEQ ID NO: 20391 - DNA, 122 bp, Homo sapiens
  misc_feature (61)..(62): /note="This region represents a CpG dinucleotide"
  misc_feature (61)..(61): /note="Nucleotide may be methylated to form 5-methylcytosine"
gctgcaaggcttaaatgaggtaaaatcacattcgtggttcatcacatgggcttaagcttccgacagctctgaatttggaaccatgctctgtaactattagctggccttggcagaatactaaa

SEQ ID NO: 20392 - DNA, 122 bp, Homo sapiens
  misc_feature (61)..(62): /note="This region represents a CpG dinucleotide"
  misc_feature (61)..(61): /note="Nucleotide may be methylated to form 5-methylcytosine"
catgtctctacctcatgttccttcatttgactacaacttataactacaggggcagtaaaccgttcacatgtgtgctgatagtttccttcctcaagtgccactggttctcagcttatctgcct

SEQ ID NO: 20393 - DNA, 122 bp, Homo sapiens
  misc_feature (61)..(62): /note="This region represents a CpG dinucleotide"
  misc_feature (61)..(61): /note="Nucleotide may be methylated to form 5-methylcytosine"
tataatcactacaaattacagacctctttcctgtgtaatgatttttgccatttgcccttccgtgatctctaataggccaactacaaggacaattttttgatcagtaagaaccttggtctgtt

SEQ ID NO: 20394 - DNA, 122 bp, Homo sapiens
  misc_feature (61)..(62): /note="This region represents a CpG dinucleotide"
  misc_feature (61)..(61): /note="Nucleotide may be methylated to form 5-methylcytosine"
cagcagttcccaaatctacctggccagttttcttaaaggctctctcaggacatctcctagcgcaaagctcacagcgtgaagtactattgtagacaataggggctgggcaccacagctcatgc

SEQ ID NO: 20395 - DNA, 122 bp, Homo sapiens
  misc_feature (61)..(62): /note="This region represents a CpG dinucleotide"
  misc_feature (61)..(61): /note="Nucleotide may be methylated to form 5-methylcytosine"
cagtccaagaagtccagtttcttaagtaacataagacagctggcctccaaatgacaagcccgcaaaatcaccagggagttatatggtgagttcactgaaggaagctatactgtaagaacaca

SEQ ID NO: 20396 - DNA, 122 bp, Homo sapiens
  misc_feature (61)..(62): /note="This region represents a CpG dinucleotide"
  misc_feature (61)..(61): /note="Nucleotide may be methylated to form 5-methylcytosine"
ctgataacaaatagacctgggtttcctagtatcgcgtccttggtatttcactcctctcatcgtctcatcactttcatttcccctcatcacctgacattgacacaaatgtcctgatgcagtag

SEQ ID NO: 20397 - DNA, 122 bp, Homo sapiens
  misc_feature (61)..(62): /note="This region represents a CpG dinucleotide"
  misc_feature (61)..(61): /note="Nucleotide may be methylated to form 5-methylcytosine"
aaagcaagtcaagtgaccaaccccagatccaaggagtgtggaaatagactctgctctagacgctacctcatagaaagaggaattatgagatcacctgaaaaaggatacatgaatacagggtt

SEQ ID NO: 20398 - DNA, 122 bp, Homo sapiens
  misc_feature (61)..(62): /note="This region represents a CpG dinucleotide"
  misc_feature (61)..(61): /note="Nucleotide may be methylated to form 5-methylcytosine"
aagttctttggaaatttactaactacaattgtctgggaatcaaaccagaaatcacactagcggacggttcaaatgagcacaaaggagagcagattcaataacactgctgaccaagcaactag

SEQ ID NO: 20399 - DNA, 122 bp, Homo sapiens
  misc_feature (61)..(62): /note="This region represents a CpG dinucleotide"
  misc_feature (61)..(61): /note="Nucleotide may be methylated to form 5-methylcytosine"
agagaatattctcagtgagtgaaataaggaagcacccactgttgttcactgggtcagaaacgtggcagatccaggactggcttgttgggcatgaccctttgttcagcagagtgattcagtgg

SEQ ID NO: 20400 - DNA, 122 bp, Homo sapiens
  misc_feature (61)..(62): /note="This region represents a CpG dinucleotide"
  misc_feature (61)..(61): /note="Nucleotide may be methylated to form 5-methylcytosine"
cagcaggtctttttccagaaagaagggaatgagccaccccaagcaacagctcctgacactcgtgttctgagaaattctgagaaacagctgcaatatctgcctccttaattgtacctggagcc

SEQ ID NO: 20401 - DNA, 122 bp, Homo sapiens
  misc_feature (61)..(62): /note="This region represents a CpG dinucleotide"
  misc_feature (61)..(61): /note="Nucleotide may be methylated to form 5-methylcytosine"
ctcaatggcattactggatccaggttaggattatctgagaatacatttatctgcattttacggaaggcaaccgaggttcatagagatagtgatttggccagcgtcacaggcccagtaaaagg

SEQ ID NO: 20402 - DNA, 122 bp, Homo sapiens
  misc_feature (61)..(62): /note="This region represents a CpG dinucleotide"
  misc_feature (61)..(61): /note="Nucleotide may be methylated to form 5-methylcytosine"
gacagtgtacacccaggattttgttctcagtctgatagtcatctgaaatgaccaatgatgcgggaagtaccctttccagatgctggctcagccagggccgagtgacctgttgcagagtccat

SEQ ID NO: 20403 - DNA, 122 bp, Homo sapiens
  misc_feature (61)..(62): /note="This region represents a CpG dinucleotide"
  misc_feature (61)..(61): /note="Nucleotide may be methylated to form 5-methylcytosine"
gacccggaggggtgatggtggctcttttgccataaccgagagcagaagcggtagcggtagcgagagcaggaaaaaaatagggcgagggagggggcgccggagaacccgagggtcgctcaggc

SEQ ID NO: 20404 - DNA, 122 bp, Homo sapiens
  misc_feature (61)..(62): /note="This region represents a CpG dinucleotide"
  misc_feature (61)..(61): /note="Nucleotide may be methylated to form 5-methylcytosine"
ctcccaagggatctctgagcccaggagggaaatgtaggagggaggagggaaaaccaaggccggcctgcaggatgtttcctttgctatcttctgctgagtgctctaaagcaggtgcaggtgca

SEQ ID NO: 20405 - DNA, 122 bp, Homo sapiens
  misc_feature (61)..(62): /note="This region represents a CpG dinucleotide"
  misc_feature (61)..(61): /note="Nucleotide may be methylated to form 5-methylcytosine"
acggtgatgcattttcacatcccactgatttgttcatgtaagcagctatttgttctgattcgctgctctgcatctcaaacttattgtgtgacttgcttctcccttaagtcattttaaaaagt

SEQ ID NO: 20406 - DNA, 122 bp, Homo sapiens
  misc_feature (61)..(62): /note="This region represents a CpG dinucleotide"
  misc_feature (61)..(61): /note="Nucleotide may be methylated to form 5-methylcytosine"
cataactcattgagatagatgacaggcaattatcgtttttgtttggcagataaggaaacacgcaagagctctctgctggttaaggcagaattgaacatggccacccaagttcgacaggctgc

SEQ ID NO: 20407 - DNA, 122 bp, Homo sapiens
  misc_feature (61)..(62): /note="This region represents a CpG dinucleotide"
  misc_feature (61)..(61): /note="Nucleotide may be methylated to form 5-methylcytosine"
acacacacacagagagaaatcaaactcttctttttcaaggatgcctcttcacactaacaacgacagaagtgtacacttaaacatcctttctattaagaggacaaattctaaaaatttgttat

SEQ ID NO: 20408 - DNA, 122 bp, Homo sapiens
  misc_feature (61)..(62): /note="This region represents a CpG dinucleotide"
  misc_feature (61)..(61): /note="Nucleotide may be methylated to form 5-methylcytosine"
ttgcaccataccacaaacactgacacttcttaaacgctgcttctcatgccaactgtttcacgttatcactgatatcaataaattcaaactatcacgtggggtggtcccacctgccagccact

SEQ ID NO: 20409 - DNA, 122 bp, Homo sapiens
  misc_feature (61)..(62): /note="This region represents a CpG dinucleotide"
  misc_feature (61)..(61): /note="Nucleotide may be methylated to form 5-methylcytosine"
ctgtccacctcttagcctgatttgtagtctaaggctcaaacatctcatcaatgagcaacccgcttttgcctccctcctctccgtctgcaggattcagggtcactgatcttattccacaactg

SEQ ID NO: 20410 - DNA, 122 bp, Homo sapiens
  misc_feature (61)..(62): /note="This region represents a CpG dinucleotide"
  misc_feature (61)..(61): /note="Nucleotide may be methylated to form 5-methylcytosine"
agcacatatattttactatggagagatttgaaggggaaaaccctgcccacaaatatttttcggtgtgcctacaaggtcctgcgaaaattaagaatgtatagttttgcccacaatgaatttct

SEQ ID NO: 20411 - DNA, 122 bp, Homo sapiens
  misc_feature (61)..(62): /note="This region represents a CpG dinucleotide"
  misc_feature (61)..(61): /note="Nucleotide may be methylated to form 5-methylcytosine"
atctgtcagttctgatggaatatactaacagtggctgggtttaaatcctggctccagggccgggcacagtggctcatgcctgtaatcccagcactggaaggctgagatgggcggatcatgaa

SEQ ID NO: 20412 - DNA, 122 bp, Homo sapiens
  misc_feature (61)..(62): /note="This region represents a CpG dinucleotide"
  misc_feature (61)..(61): /note="Nucleotide may be methylated to form 5-methylcytosine"
tacttttggcttttggggccatatggtcactgtcctaactactgaacactccactgtagacggaaggcagccacagacaatttgcaaatgaaaagatgttggctatgttccaataaaatttt

SEQ ID NO: 20413 - DNA, 122 bp, Homo sapiens
  misc_feature (61)..(62): /note="This region represents a CpG dinucleotide"
  misc_feature (61)..(61): /note="Nucleotide may be methylated to form 5-methylcytosine"
tatccctttctctttctgtattcacctatttgggctatctttcaattaagactaatcccacgagcattcacagtataggcaggggtttatcttcctcactacttagcaagaggtcctaagaa

SEQ ID NO: 20414 - DNA, 122 bp, Homo sapiens
  misc_feature (61)..(62): /note="This region represents a CpG dinucleotide"
  misc_feature (61)..(61): /note="Nucleotide may be methylated to form 5-methylcytosine"
agactgctgtcctaattcactgctatgaatcaacatgtcaatatgcttagcagaaagctgcgagttacagaatcataaaatcactcagctgctatggttctgaggacagggaaacctggcct

SEQ ID NO: 20415 - DNA, 122 bp, Homo sapiens
  misc_feature (61)..(62): /note="This region represents a CpG dinucleotide"
  misc_feature (61)..(61): /note="Nucleotide may be methylated to form 5-methylcytosine"
cttctcttctcctcccagcttctctatcaaggaatgatgtactcagactgtgaataaatgcgagtgacccccatctgcccacccccacttcccagagccttctgctggagaagggggtgggg

SEQ ID NO: 20416 - DNA, 122 bp, Homo sapiens
  misc_feature (61)..(62): /note="This region represents a CpG dinucleotide"
  misc_feature (61)..(61): /note="Nucleotide may be methylated to form 5-methylcytosine"
gtttattaacattatctggtcgtgtgtgctgtggacgatcacgtgtgctggacttgtgcccggctggcagcgctgtggacttgttcacgctggcgtcacacaggggcgggagccatgcgttg

SEQ ID NO: 20417 - DNA, 122 bp, Homo sapiens
  misc_feature (61)..(62): /note="This region represents a CpG dinucleotide"
  misc_feature (61)..(61): /note="Nucleotide may be methylated to form 5-methylcytosine"
gtggagcaccctttatgacacaaacaagagctcaaggatggtggctggggttcagtctgccgctgcaaataccaaaagctgtcctcattgagtcatccctcccagagcaggaagagcagagg

SEQ ID NO: 20418 - DNA, 122 bp, Homo sapiens
  misc_feature (61)..(62): /note="This region represents a CpG dinucleotide"
  misc_feature (61)..(61): /note="Nucleotide may be methylated to form 5-methylcytosine"
ggaaagcagatgccccaaaggcagctcttccacacaatcaatgggagccctggggagagccgtgaagtctttgagtctttgtcctggctcccatttctctccaagtaacagacacgagagaa

SEQ ID NO: 20419 - DNA, 122 bp, Homo sapiens
  misc_feature (61)..(62): /note="This region represents a CpG dinucleotide"
  misc_feature (61)..(61): /note="Nucleotide may be methylated to form 5-methylcytosine"
aatcacattcatagagatagaaagtagaatggtggttgccaggttgagggcaggaaggaacgttcagttattgtttaataggtacagagtttcagtctagaagaatgagaaagttctggaga

SEQ ID NO: 20420 - DNA, 122 bp, Homo sapiens
  misc_feature (61)..(62): /note="This region represents a CpG dinucleotide"
  misc_feature (61)..(61): /note="Nucleotide may be methylated to form 5-methylcytosine"
cgtaggcagcttcaatatggctttactctctctctgggtgtgagcaagctgcatgtacagcgttagcagggtaattataacttttacagacaatagtggctctgagccaagcatgagctcac

SEQ ID NO: 20421 - DNA, 122 bp, Homo sapiens
  misc_feature (61)..(62): /note="This region represents a CpG dinucleotide"
  misc_feature (61)..(61): /note="Nucleotide may be methylated to form 5-methylcytosine"
tacataaagcgtaagatttatcttttgtttgtttttacttttaaagaaatgtaaacagatcgcacagagtaaagaagatgatgatgtaatagtgaataaacctcatgtttcggatgaagagg

SEQ ID NO: 20422 - DNA, 122 bp, Homo sapiens
  misc_feature (61)..(62): /note="This region represents a CpG dinucleotide"
  misc_feature (61)..(61): /note="Nucleotide may be methylated to form 5-methylcytosine"
caaagtgcccgcagaccccctcaattctcacttgtattcaggtttgtggacacatgcctccgggctcactgcagccacccgtgtggaggaagaggaggaagagggctcgccacgccccagag

SEQ ID NO: 20423 - DNA, 122 bp, Homo sapiens
  misc_feature (61)..(62): /note="This region represents a CpG dinucleotide"
  misc_feature (61)..(61): /note="Nucleotide may be methylated to form 5-methylcytosine"
gattacaggcgtgacccactgctcccgacagagtattcattagtttcattgctgtcttttcgtccatgtaagctttgaaacagtgagaagatgcagccctgttgagttggcaactaatgaaa

SEQ ID NO: 20424 - DNA, 122 bp, Homo sapiens
  misc_feature (61)..(62): /note="This region represents a CpG dinucleotide"
  misc_feature (61)..(61): /note="Nucleotide may be methylated to form 5-methylcytosine"
ggtagagaaacagctgatctcgtgttagccactgggtacaactgtgcctgcgtaaccctgcgcttttaaaaaacggaagtcaacgcaaatctcttcctcaggaaattgatatttagactgtg

SEQ ID NO: 20425 - DNA, 122 bp, Homo sapiens
  misc_feature (61)..(62): /note="This region represents a CpG dinucleotide"
  misc_feature (61)..(61): /note="Nucleotide may be methylated to form 5-methylcytosine"
aaaggaaactcttgctttgctttcattgcagtcagccctttaataggaaattatcaggctcgctgctgttgatcagagaagctggccttgctattgtgacagcttaactaatagagagcaaa

SEQ ID NO: 20426 - DNA, 122 bp, Homo sapiens
  misc_feature (61)..(62): /note="This region represents a CpG dinucleotide"
  misc_feature (61)..(61): /note="Nucleotide may be methylated to form 5-methylcytosine"
tgtgttaaagccatgactatcttctcaggcatccaagcttgaatcttcagaactgtctggcgttctcttttcaaagtccacatgatcatcagctgagaaggagcatgactttcaccttattt

SEQ ID NO: 20427 - DNA, 122 bp, Homo sapiens
  misc_feature (61)..(62): /note="This region represents a CpG dinucleotide"
  misc_feature (61)..(61): /note="Nucleotide may be methylated to form 5-methylcytosine"
aaacctcacccagcagcttctgggatcctcctgaagactgtctcatagcaagttgccagccgctgaatgcagcactgtccttaattcctggcttgtgtgccaaatttttatcccggatcaaa

SEQ ID NO: 20428 - DNA, 122 bp, Homo sapiens
  misc_feature (61)..(62): /note="This region represents a CpG dinucleotide"
  misc_feature (61)..(61): /note="Nucleotide may be methylated to form 5-methylcytosine"
gtgcgtagtacgaatttgtgcctgctgggtccttgtacctttacgccaggcagaaatctccgtaatcgtcagtgtagatttcatttccttgtggcaaggaatataaagtaatacaaccaaag

SEQ ID NO: 20429 - DNA, 122 bp, Homo sapiens
  misc_feature (61)..(62): /note="This region represents a CpG dinucleotide"
  misc_feature (61)..(61): /note="Nucleotide may be methylated to form 5-methylcytosine"
aggaagcagtttttagaagttctgttgcaacctgtagtgactctgtggtgactcagtaggcgggttgaatttctgttgagatggtaagaaagagggaggattttgtttatttatttatttat

SEQ ID NO: 20430 - DNA, 122 bp, Homo sapiens
  misc_feature (61)..(62): /note="This region represents a CpG dinucleotide"
  misc_feature (61)..(61): /note="Nucleotide may be methylated to form 5-methylcytosine"
ttttaaattgtaagcccttctgaatgttgtgacgaaatcttgagtcaccctgctctgtctcgctggataggagtcatccctttgtccagcatatccatgctgcacacactgtctgcccatta

SEQ ID NO: 20431 - DNA, 122 bp, Homo sapiens
  misc_feature (61)..(62): /note="This region represents a CpG dinucleotide"
  misc_feature (61)..(61): /note="Nucleotide may be methylated to form 5-methylcytosine"
tacaatggcagaatttatctgaagattcacaatctacaaatggaactgccactttttcaacggagaccatctcagtggcatcgctggaaagtccagattgcctgacacactggtaaccaact

SEQ ID NO: 20432 - DNA, 122 bp, Homo sapiens
  misc_feature (61)..(62): /note="This region represents a CpG dinucleotide"
  misc_feature (61)..(61): /note="Nucleotide may be methylated to form 5-methylcytosine"
tgttgtggggagagagactgcagtgactgtgggacttttccttggaccttagtgctgccccgtcacaacagaaagcaaaactgggctgaactcagatgatatctatggaggaagggtttagt

SEQ ID NO: 20433 - DNA, 122 bp, Homo sapiens
  misc_feature (61)..(62): /note="This region represents a CpG dinucleotide"
  misc_feature (61)..(61): /note="Nucleotide may be methylated to form 5-methylcytosine"
ctaaataaatctctaaataaataaacaaataataaatgttattgtccattaagtctacagcgttaggggaagtaaactgacatttgcaaagtcattatgtgtcaagcactgtttgaagtact

SEQ ID NO: 20434 - DNA, 122 bp, Homo sapiens
  misc_feature (61)..(62): /note="This region represents a CpG dinucleotide"
  misc_feature (61)..(61): /note="Nucleotide may be methylated to form 5-methylcytosine"
tttacttctatgtccaggcttccatgtatacattcagaaaatacttccttgattctttttcgctatttgttttttacacaaaaacgaagaggcacgctgttatatgattattactatgggtt

SEQ ID NO: 20435 - DNA, 122 bp, Homo sapiens
  misc_feature (61)..(62): /note="This region represents a CpG dinucleotide"
  misc_feature (61)..(61): /note="Nucleotide may be methylated to form 5-methylcytosine"
gacagatctggctggggtggattcgaatgagtaataacagtagcagagacttgtgcttaccgtgtgcctatccctctgctaaggacttcatgcagaaatggaggcagagaggtgaatgaagt

SEQ ID NO: 20436 - DNA, 122 bp, Homo sapiens
  misc_feature (61)..(62): /note="This region represents a CpG dinucleotide"
  misc_feature (61)..(61): /note="Nucleotide may be methylated to form 5-methylcytosine"
cagaaagactgggtttcttccttataactcaaggtctacaggagctgattagatccctggcgccagtgactgagcatttctcagccttgtcctcagaacccagaagcatctcccagggacgt

SEQ ID NO: 20437 - DNA, 122 bp, Homo sapiens
  misc_feature (61)..(62): /note="This region represents a CpG dinucleotide"
  misc_feature (61)..(61): /note="Nucleotide may be methylated to form 5-methylcytosine"
gactgagggttatgtgcgcaggctttgaaacaagacagtcatgagctcaatccctggtaacgggtttagctggtgtgttatcttaaacctgttacttaatccgcctgagccttggtttcctc

SEQ ID NO: 20438 - DNA, 122 bp, Homo sapiens
  misc_feature (61)..(62): /note="This region represents a CpG dinucleotide"
  misc_feature (61)..(61): /note="Nucleotide may be methylated to form 5-methylcytosine"
gctaagaagtccaagattgagtgcctgacacctggcctttttgctgtgtcatggtcatcccgtcctggaaggcagaagggcaggaggagaggagggggagggaagtgcctgtcctcgtgcac

SEQ ID NO: 20439 - DNA, 122 bp, Homo sapiens
  misc_feature (61)..(62): /note="This region represents a CpG dinucleotide"
  misc_feature (61)..(61): /note="Nucleotide may be methylated to form 5-methylcytosine"
gatctccagacactcaggacaagtcagtgtccccaccaaggatggggctttgagaggctccgcccacctctgtttctgcacagcaggtttagcagctccattcttccccagagagccactcc

SEQ ID NO: 20440 - DNA, 122 bp, Homo sapiens
  misc_feature (61)..(62): /note="This region represents a CpG dinucleotide"
  misc_feature (61)..(61): /note="Nucleotide may be methylated to form 5-methylcytosine"
aatcacattttcccgatgtttgggtagattgttgggaaatctctccagcatcttggtagacgcagacagtggggtttcatggtgtcctatgacaggaaacaaaacctttagtgagaacaatt

SEQ ID NO: 20441 - DNA, 122 bp, Homo sapiens
  misc_feature (61)..(62): /note="This region represents a CpG dinucleotide"
  misc_feature (61)..(61): /note="Nucleotide may be methylated to form 5-methylcytosine"
cactgtcccatgccactctgatcctgagcagccaagtgggcagaatgacactcctttgggcgtggaagtgaacatcagccatgagtagggagaggaaactgcccacagagagggcagactcc

SEQ ID NO: 20442 - DNA, 122 bp, Homo sapiens
  misc_feature (61)..(62): /note="This region represents a CpG dinucleotide"
  misc_feature (61)..(61): /note="Nucleotide may be methylated to form 5-methylcytosine"
tcaaagagagggtgaccatctaatttaccttccagactgggaaattctgagagtggaaggcggtgctattaataatttcaccaaggcaacaggcataaaccagtggtatccaggccaaacat

SEQ ID NO: 20443 - DNA, 122 bp, Homo sapiens
  misc_feature (61)..(62): /note="This region represents a CpG dinucleotide"
  misc_feature (61)..(61): /note="Nucleotide may be methylated to form 5-methylcytosine"
cactccatcaatgtcagtttccttcatccattcattcatgactcatgaaacaactaaagacgtctttgtgcaacaaaaacagaagccacactctgaatcacaccatgtaagaatgaaagagc

SEQ ID NO: 20444 - DNA, 122 bp, Homo sapiens
  misc_feature (61)..(62): /note="This region represents a CpG dinucleotide"
  misc_feature (61)..(61): /note="Nucleotide may be methylated to form 5-methylcytosine"
gtaagccaccgggcccagccaaggctgagtcttaatgggcttttgatttcagtctccttccgttcccaggtcaataaacaataggcttttccaatcttttcatgccgccaatttctggcctt

SEQ ID NO: 20445 - DNA, 122 bp, Homo sapiens
  misc_feature (61)..(62): /note="This region represents a CpG dinucleotide"
  misc_feature (61)..(61): /note="Nucleotide may be methylated to form 5-methylcytosine"
caattataatgaggttttacaaagcaggttcagatgccagcgcacctgggctcctcctggcgcactgcgatttaaagcaagttatttcacctctcagggcttagctttagcatcgataagaa

SEQ ID NO: 20446 - DNA, 122 bp, Homo sapiens
  misc_feature (61)..(62): /note="This region represents a CpG dinucleotide"
  misc_feature (61)..(61): /note="Nucleotide may be methylated to form 5-methylcytosine"
ctttaacactgctcagaaatactgtatgagttcagggaaaacagctgggttggggttttgcgaggctgtcactatggaaggaaatacaggtttaaagatactgacaaaacaaaggatgaagt

SEQ ID NO: 20447 - DNA, 122 bp, Homo sapiens
  misc_feature (61)..(62): /note="This region represents a CpG dinucleotide"
  misc_feature (61)..(61): /note="Nucleotide may be methylated to form 5-methylcytosine"
ttgtgagcacacctacttggccgagcaggaagtccatcaaagctgagacacagtgcaccacgctgcagttgacctgggtcaagtgcatgccccactggtgcagaaattctttgcccaccaac

SEQ ID NO: 20448 - DNA, 122 bp, Homo sapiens
  misc_feature (61)..(62): /note="This region represents a CpG dinucleotide"
  misc_feature (61)..(61): /note="Nucleotide may be methylated to form 5-methylcytosine"
ggaacacagccacattcatttgtttacatattgtctatggcttccttccagctataacagcgtagttaagtaactgcaacactgacattgtggcccacaaagcctaaaatatttaccatctg

SEQ ID NO: 20449 - DNA, 122 bp, Homo sapiens
  misc_feature (61)..(62): /note="This region represents a CpG dinucleotide"
  misc_feature (61)..(61): /note="Nucleotide may be methylated to form 5-methylcytosine"
ggtcatggagggaataaactggagagcgtttggtatgtgctcagtgtctgctccattgtgcgcactcagcctatggtcatttttaatttttaaatccagccccagggtgaggcttcccttgt

SEQ ID NO: 20450 - DNA, 122 bp, Homo sapiens
  misc_feature (61)..(62): /note="This region represents a CpG dinucleotide"
  misc_feature (61)..(61): /note="Nucleotide may be methylated to form 5-methylcytosine"
tgtggcttgtagcagctgtcataccttagttcctcaggtaaaacttcaattttaacctcccgttgcattaataataaatcaacatgtgcacgtgacctttcagagcccaaaatgtgatcata

SEQ ID NO: 20451 - DNA, 122 bp, Homo sapiens
  misc_feature (61)..(62): /note="This region represents a CpG dinucleotide"
  misc_feature (61)..(61): /note="Nucleotide may be methylated to form 5-methylcytosine"
cgtgaactccgcgtccatggcctaccctgtgattgtcatcatttctatgtgagaaaaaagcggctactgattcacagcgaaaggaaacggactaggttctgaaacttcctgtttgtctggta

SEQ ID NO: 20452 - DNA, 122 bp, Homo sapiens
  misc_feature (61)..(62): /note="This region represents a CpG dinucleotide"
  misc_feature (61)..(61): /note="Nucleotide may be methylated to form 5-methylcytosine"
aattagtctgaatgctacatctggcatggttacatcatttgaactctctgacaacactaacgaccaatctggagaacaggaatctgagtatgaacaagaacaaggagaggatgaactggttt

SEQ ID NO: 20453 - DNA, 122 bp, Homo sapiens
  misc_feature (61)..(62): /note="This region represents a CpG dinucleotide"
  misc_feature (61)..(61): /note="Nucleotide may be methylated to form 5-methylcytosine"
caggaagatgctgtcaaccaggaaggcatccttaggaagaggctccaagaaaccagccaacggctggaggatgtggaggagcaggtagggtggctcatggctacattagattcaggggacat

SEQ ID NO: 20454 - DNA, 122 bp, Homo sapiens
  misc_feature (61)..(62): /note="This region represents a CpG dinucleotide"
  misc_feature (61)..(61): /note="Nucleotide may be methylated to form 5-methylcytosine"
cttctctgacaggtgtattgccctttatattcatgttgcccagcagtgttcctggcctagcgtagctgccaataaaattgattgatttgatttgaatcatattcagcaccctggagtcactg

SEQ ID NO: 20455 - DNA, 122 bp, Homo sapiens
  misc_feature (61)..(62): /note="This region represents a CpG dinucleotide"
  misc_feature (61)..(61): /note="Nucleotide may be methylated to form 5-methylcytosine"
ccagcggtgagcgtggaggacgtacttggccacccggtccagctcttcagctgtcacagccggctttcaccccgcagcgtgatcatctgagacacgttttcactcacagagatcaggatgct

SEQ ID NO: 20456 - DNA, 122 bp, Homo sapiens
  misc_feature (61)..(62): /note="This region represents a CpG dinucleotide"
  misc_feature (61)..(61): /note="Nucleotide may be methylated to form 5-methylcytosine"
acttttaggggaaggcctcggagagagcccgaggggttgtctatggcttcagtacctcaacgcaagaggacactgctgaccagctgcattggagtcacctggaagcttgttagaaatgcata

SEQ ID NO: 20457 - DNA, 122 bp, Homo sapiens
  misc_feature (61)..(62): /note="This region represents a CpG dinucleotide"
  misc_feature (61)..(61): /note="Nucleotide may be methylated to form 5-methylcytosine"
gtgactgtgtcaccataccactgcagggcagctcccagacagggaatggcttcagggaaacggagggagagaaaaaaaggaatcagcagtttccaccactttctctagcttgcagcagactt

SEQ ID NO: 20458 - DNA, 122 bp, Homo sapiens
  misc_feature (61)..(62): /note="This region represents a CpG dinucleotide"
  misc_feature (61)..(61): /note="Nucleotide may be methylated to form 5-methylcytosine"
ttaagtgcagactccaggtggctcagccggcacctgatggtcagcagcacacatcagacacgcagctcaaccgtccagttcctccggatcttactgctggcacccatattgaggtggaagga

SEQ ID NO: 20459 - DNA, 122 bp, Homo sapiens
  misc_feature (61)..(62): /note="This region represents a CpG dinucleotide"
  misc_feature (61)..(61): /note="Nucleotide may be methylated to form 5-methylcytosine"
atcatgtgtcatgtgcctatctcccttctttatttttaaatggcacacgagtgtctgactcgcacatggtatttcttgctttttagactggtgccagactcagtgtcttttgtttttaatag

SEQ ID NO: 20460 - DNA, 122 bp, Homo sapiens
  misc_feature (61)..(62): /note="This region represents a CpG dinucleotide"
  misc_feature (61)..(61): /note="Nucleotide may be methylated to form 5-methylcytosine"
ccctctgagattgctgaaatctaaaggaataaaaatttcgtttcctctataaactattctcggggcctcttgtccacttcccagatgcagttacaagggaatcacttttctggatagccaat

SEQ ID NO: 20461 - DNA, 122 bp, Homo sapiens
  misc_feature (61)..(62): /note="This region represents a CpG dinucleotide"
  misc_feature (61)..(61): /note="Nucleotide may be methylated to form 5-methylcytosine"
acacccaaagatgtcaatttactagtcacacctgcagccagtgtgctcagtgagagcaggcgctggcaagggtggggtgagggtgacatcttgtgggaaattttgtttgcccagtcactata

SEQ ID NO: 20462 - DNA, 122 bp, Homo sapiens
  misc_feature (61)..(62): /note="This region represents a CpG dinucleotide"
  misc_feature (61)..(61): /note="Nucleotide may be methylated to form 5-methylcytosine"
gtttagcagccaacactgttaaccatagctaacaaggaatgatttttcccactctaatttcgaggtatgtatgattgctggtaaactccatcaggctatgcggttataatcctgagagagtc

SEQ ID NO: 20463 - DNA, 122 bp, Homo sapiens
  misc_feature (61)..(62): /note="This region represents a CpG dinucleotide"
  misc_feature (61)..(61): /note="Nucleotide may be methylated to form 5-methylcytosine"
gggaaacatgtgacacacggttaaaaccatcaggaaatgcctctttaataaagatgacaccgtaaagataagaaacagccaactaagccaaggaagaagggagcatgccaggcaaaaggaaa

SEQ ID NO: 20464 - DNA, 122 bp, Homo sapiens
  misc_feature (61)..(62): /note="This region represents a CpG dinucleotide"
  misc_feature (61)..(61): /note="Nucleotide may be methylated to form 5-methylcytosine"
ttgcctttactttgaagactggttcaattcggagtggtagaagatgctcaagatgtagaacgtggaagccttttgagtctagagaagtctttgatgatgttctccttggctgctgcccataa

SEQ ID NO: 20465 - DNA, 122 bp, Homo sapiens
  misc_feature (61)..(62): /note="This region represents a CpG dinucleotide"
  misc_feature (61)..(61): /note="Nucleotide may be methylated to form 5-methylcytosine"
gtgggaaagcactctgcaaactgtcaagttctcctgcaacctgcaggtaagatgccctctcgtgggaggaggaaccgagacccagccttaggggaagggtgccctgggtcagccctacttgc

SEQ ID NO: 20466 - DNA, 122 bp, Homo sapiens
  misc_feature (61)..(62): /note="This region represents a CpG dinucleotide"
  misc_feature (61)..(61): /note="Nucleotide may be methylated to form 5-methylcytosine"
ccccgataaagcaaggtgcctcccttccctctgtcaagtttttccgtcagactccctgctcgcagtggccttccttcccaggcactgatgatgcatagactcaccctggctgttttgcttgg

SEQ ID NO: 20467 - DNA, 122 bp, Homo sapiens
  misc_feature (61)..(62): /note="This region represents a CpG dinucleotide"
  misc_feature (61)..(61): /note="Nucleotide may be methylated to form 5-methylcytosine"
tttccatcattcagccttattaaaatacaccccttttaagccagaatcttttgagaatggcgtttgtgtgtggaccagccctacatttgataatctacctgtcattctggtagatatttaca

SEQ ID NO: 20468 - DNA, 122 bp, Homo sapiens
  misc_feature (61)..(62): /note="This region represents a CpG dinucleotide"
  misc_feature (61)..(61): /note="Nucleotide may be methylated to form 5-methylcytosine"
aacatttgtcaccagaaatccactacttccctaacttgatcgacaacacttactgatgtacggatattgacacagtacaggtttaagtgagaggtaaagccagctggtcttctgggtcggtt

SEQ ID NO: 20469 - DNA, 122 bp, Homo sapiens
  misc_feature (61)..(62): /note="This region represents a CpG dinucleotide"
  misc_feature (61)..(61): /note="Nucleotide may be methylated to form 5-methylcytosine"
tcttattcttgttaacaggatctgatccagtgtcacagttacaacctgttaggatactgccgtgtgaagctcagaggcttatctttctgctctgtgcttgtgattttagacaatcctatctg

SEQ ID NO: 20470 - DNA, 122 bp, Homo sapiens
  misc_feature (61)..(62): /note="This region represents a CpG dinucleotide"
  misc_feature (61)..(61): /note="Nucleotide may be methylated to form 5-methylcytosine"
tgttcaccaagtgtttatgaatcatccaagaaggtcaggataggtttttgttttgctttacgggagacatcctgaatctgaaaggcagaagacacctatctggcaggtccagggttagcaca

SEQ ID NO: 20471 - DNA, 122 bp, Homo sapiens
  misc_feature (61)..(62): /note="This region represents a CpG dinucleotide"
  misc_feature (61)..(61): /note="Nucleotide may be methylated to form 5-methylcytosine"
acagaataacgtgacagtggaattgcagaaggtcaggggtggttgtttcaatgagagaatcgtcaaatattaattctggaacgtccagatgagtaggcattgagggggattagctggctgct

SEQ ID NO: 20472 - DNA, 122 bp, Homo sapiens
  misc_feature (61)..(62): /note="This region represents a CpG dinucleotide"
  misc_feature (61)..(61): /note="Nucleotide may be methylated to form 5-methylcytosine"
aggagtggctgcattcaggtggcttcatttttttctgtcgattgggagaggaatttaatgcgttagcagtgcgcatgggccagcctgaattgtttctgcaaagattactcttccaaaagtca

SEQ ID NO: 20473 - DNA, 122 bp, Homo sapiens
  misc_feature (61)..(62): /note="This region represents a CpG dinucleotide"
  misc_feature (61)..(61): /note="Nucleotide may be methylated to form 5-methylcytosine"
ttgagctctgagctgtgcttcctcttcctgagctggcctctagtaagtgctcaataaacacgatggggagagggacactgaagcctaatctgcctgggtggaggatgaagcaagtaaaagga

SEQ ID NO: 20474 - DNA, 122 bp, Homo sapiens
  misc_feature (61)..(62): /note="This region represents a CpG dinucleotide"
  misc_feature (61)..(61): /note="Nucleotide may be methylated to form 5-methylcytosine"
gtgtttggatttaaaaaccagagatcccaggtaggttagttccagctccccagctaaagacgtattacgtgattagccagcctctttttccttctaaattaaaaggattaagtatattttag

SEQ ID NO: 20475 - DNA, 122 bp, Homo sapiens
  misc_feature (61)..(62): /note="This region represents a CpG dinucleotide"
  misc_feature (61)..(61): /note="Nucleotide may be methylated to form 5-methylcytosine"
cgataagcctgtggtatttccagctcctgcatatcttgatgcagttgagtgagaatgaagcgattccacctctgaatgagcctggccagattgcccttgcctgaggcctcatctgagtcagc

SEQ ID NO: 20476 - DNA, 122 bp, Homo sapiens
  misc_feature (61)..(62): /note="This region represents a CpG dinucleotide"
  misc_feature (61)..(61): /note="Nucleotide may be methylated to form 5-methylcytosine"
cttaaatgcagactttcccagaaacagaggtggacttaatgaccatgaaagatcccactccgccttgtgattttgtgatttcaaagtattatacttacacgggtcacagtgtacctacaagc

SEQ ID NO: 20477 - DNA, 122 bp, Homo sapiens
  misc_feature (61)..(62): /note="This region represents a CpG dinucleotide"
  misc_feature (61)..(61): /note="Nucleotide may be methylated to form 5-methylcytosine"
tatcaagaaacaagctggggattccaggaactgggctggggaggcactgaaactggggaacgagcgagtttattgtctcatacccaccacaggaaaagagaaggacaggccaagggtgccac

SEQ ID NO: 20478 - DNA, 122 bp, Homo sapiens
  misc_feature (61)..(62): /note="This region represents a CpG dinucleotide"
  misc_feature (61)..(61): /note="Nucleotide may be methylated to form 5-methylcytosine"
tgtgacgttgtcttcctgtgacgttgtctgtagccagcaggagacacgacggcacggtggcgtgcccggcttcgggctgggtgtcctgggcgtccaggcaagtgaaggctcttttcttctgg

SEQ ID NO: 20479 - DNA, 122 bp, Homo sapiens
  misc_feature (61)..(62): /note="This region represents a CpG dinucleotide"
  misc_feature (61)..(61): /note="Nucleotide may be methylated to form 5-methylcytosine"
cgttgtgtgcaacagtaaccagaccaccacagccaggccccccacacttcctctctccttcgtcagttctgcagtttggcccgccacattcagtctcggaacaggaggcccctgggggtgtt

SEQ ID NO: 20480 - DNA, 122 bp, Homo sapiens
  misc_feature (61)..(62): /note="This region represents a CpG dinucleotide"
  misc_feature (61)..(61): /note="Nucleotide may be methylated to form 5-methylcytosine"
tgggcctgagcttctaagatctcagtaggtgttttacctcctaaaccaacattgggagagcgttaaaattatttatctctgcccttcagttacataagctaccttctattgatctgtctcat

SEQ ID NO: 20481 - DNA, 122 bp, Homo sapiens
  misc_feature (61)..(62): /note="This region represents a CpG dinucleotide"
  misc_feature (61)..(61): /note="Nucleotide may be methylated to form 5-methylcytosine"
acacttttctcttccaagctcttacttggacctatgcggcaaagctgatctgttgaaagacgtttagtgacacataaatgtctttaattaatggaatgaaaatgacatgagatggatttgta

SEQ ID NO: 20482 - DNA, 122 bp, Homo sapiens
  misc_feature (61)..(62): /note="This region represents a CpG dinucleotide"
  misc_feature (61)..(61): /note="Nucleotide may be methylated to form 5-methylcytosine"
ctgagtcacctggagccccattgtggcatccaggttaaccttctctagcactgtagcattcgctgagtcaagaccggctgctgtttccttcctcctcgaaaaaatcactatccatattcaag

SEQ ID NO: 20483 - DNA, 122 bp, Homo sapiens
  misc_feature (61)..(62): /note="This region represents a CpG dinucleotide"
  misc_feature (61)..(61): /note="Nucleotide may be methylated to form 5-methylcytosine"
tatacacagtttgattggcactcctattgacactttatttggtttgtgacttgtttgtctcggtgcctttctattaatatattttttctatttaaactaccctctttttttcagtacagcac

SEQ ID NO: 20484 - DNA, 122 bp, Homo sapiens
  misc_feature (61)..(62): /note="This region represents a CpG dinucleotide"
  misc_feature (61)..(61): /note="Nucleotide may be methylated to form 5-methylcytosine"
tcatgtaatcctgagtcgataggccccagacagctgtgaggaagtggatcagagagcaagcggacctcatggtcaatgctgagtgtgctgcaagcttggtttatcttcatttctcccccttc

SEQ ID NO: 20485 - DNA, 122 bp, Homo sapiens
  misc_feature (61)..(62): /note="This region represents a CpG dinucleotide"
  misc_feature (61)..(61): /note="Nucleotide may be methylated to form 5-methylcytosine"
aacacccggaagccgcccttgtcctctccagctgcagcctgattgcccggttttcggccccgtgccccttattggataaagcttcaggccccgtccccagtccgtgagtgacagaagatgtg

SEQ ID NO: 20486 - DNA, 122 bp, Homo sapiens
  misc_feature (61)..(62): /note="This region represents a CpG dinucleotide"
  misc_feature (61)..(61): /note="Nucleotide may be methylated to form 5-methylcytosine"
agaatacgcttccctaactctacttaactacaatttacataatcttcatgtctcagcatgcgtctcttttcctcagagaagccttctctgaatcccggaccaggtttgggtcctctcttcta

SEQ ID NO: 20487 - DNA, 122 bp, Homo sapiens
  misc_feature (61)..(62): /note="This region represents a CpG dinucleotide"
  misc_feature (61)..(61): /note="Nucleotide may be methylated to form 5-methylcytosine"
ggaattttagggctagattctcatcctctagtgcttctttgcacattggcccataaggagcgctagctgaagagtaactcaggggctgatttttagatggggctctggcttactatttgttt

SEQ ID NO: 20488 - DNA, 122 bp, Homo sapiens
  misc_feature (61)..(62): /note="This region represents a CpG dinucleotide"
  misc_feature (61)..(61): /note="Nucleotide may be methylated to form 5-methylcytosine"
ttattccatggggatattctgtgaaagtcctacttctcctttttaataattgagtggcctcgagcaagtcactcaatctctctaggtctctaagatgattatgatcactaagcatcactctt

SEQ ID NO: 20489 - DNA, 122 bp, Homo sapiens
  misc_feature (61)..(62): /note="This region represents a CpG dinucleotide"
  misc_feature (61)..(61): /note="Nucleotide may be methylated to form 5-methylcytosine"
atcttccatgtatctgatataaaaaccacagtcaagtacaccctcaataccacagcaccacgctgactaagcatgactagctctttcaaacagttatttcttaaatgctcacttgcagctta

SEQ ID NO: 20490 - DNA, 122 bp, Homo sapiens
  misc_feature (61)..(62): /note="This region represents a CpG dinucleotide"
  misc_feature (61)..(61): /note="Nucleotide may be methylated to form 5-methylcytosine"
ccctcagaaaaggaactagatgctgcagttccttgtcagaagtaaacttggagcgaaacacgcctttaggaggggtaaccaggctgctttcctctatttttaaagctgtagtatgaagccaa

SEQ ID NO: 20491 - DNA, 122 bp, Homo sapiens
  misc_feature (61)..(62): /note="This region represents a CpG dinucleotide"
  misc_feature (61)..(61): /note="Nucleotide may be methylated to form 5-methylcytosine"
gatggtaaatgctgtaggactctgggaataagcagatgtgtgaaggcaggatgaggcatgcgggtcacagattgcaggtggcatcactactcgctcagtctctgagcaaacatttgtcgaga

SEQ ID NO: 20492 - DNA, 122 bp, Homo sapiens
  misc_feature (61)..(62): /note="This region represents a CpG dinucleotide"
  misc_feature (61)..(61): /note="Nucleotide may be methylated to form 5-methylcytosine"
gtttttcagtgaacaatgggacatctcctcagtcacaggaggtcaagctgcttcccctggcgaggaagactcagggtgacttcagggctcaagattgtctgtttcacagttgggtgcagtgg

SEQ ID NO: 20493 - DNA, 122 bp, Homo sapiens
  misc_feature (61)..(62): /note="This region represents a CpG dinucleotide"
  misc_feature (61)..(61): /note="Nucleotide may be methylated to form 5-methylcytosine"
tcccaaagtgctgggattacagatgtgagccaccacgcctggccaaaacttttttatatacgtttttcagtcagctttctcaggttgaatcattgtggttttgatttgtatttctttttttt

SEQ ID NO: 20494 - DNA, 122 bp, Homo sapiens
  misc_feature (61)..(62): /note="This region represents a CpG dinucleotide"
  misc_feature (61)..(61): /note="Nucleotide may be methylated to form 5-methylcytosine"
cgttttcacgaggcctgtgtgaaacacttaaaaattgtgcataacatgtgactggacaggcgtctaccagaaaacagtgcaaggagcttttaagccatgaggtttgcatctgtaggaaggct

SEQ ID NO: 20495 - DNA, 122 bp, Homo sapiens
  misc_feature (61)..(62): /note="This region represents a CpG dinucleotide"
  misc_feature (61)..(61): /note="Nucleotide may be methylated to form 5-methylcytosine"
cggagctggagctagtttttcatcatctgtcggcttctgcagaccaatgtcatcattccccgtcccctgggtggcccctcccccgccatcgttacgctgtcatcagcaagatcactgtcact

SEQ ID NO: 20496 - DNA, 122 bp, Homo sapiens
  misc_feature (61)..(62): /note="This region represents a CpG dinucleotide"
  misc_feature (61)..(61): /note="Nucleotide may be methylated to form 5-methylcytosine"
aggtgctgcattagggctttctgtgtttcatctcatcccatacctgccaagcccttcctacggctactttattttagagatgagcaaagtgaggcttgtgcccaaggaaacagagctagcat

SEQ ID NO: 20497 - DNA, 122 bp, Homo sapiens
  misc_feature (61)..(62): /note="This region represents a CpG dinucleotide"
  misc_feature (61)..(61): /note="Nucleotide may be methylated to form 5-methylcytosine"
gctcactggggtcactgattgctgcatgcaggagcttcctgtggagtttcatcactctggcgggcagcactcttaataggatttttacagtgtaacttagcttgaacccacaagaaaaacat

SEQ ID NO: 20498 - DNA, 122 bp, Homo sapiens
  misc_feature (61)..(62): /note="This region represents a CpG dinucleotide"
  misc_feature (61)..(61): /note="Nucleotide may be methylated to form 5-methylcytosine"
cagaggctgcctagggcggggagatcctacttggattggggccgatcgtcaggaaggtgtcgcaatgtaaaattatgtccagttgtagatgtgtgtgttggggtttaactgtagggtgggca

SEQ ID NO: 20499 - DNA, 122 bp, Homo sapiens
  misc_feature (61)..(62): /note="This region represents a CpG dinucleotide"
  misc_feature (61)..(61): /note="Nucleotide may be methylated to form 5-methylcytosine"
ctatgggattctcatgtaggtggaaatgcttgagtgggcgcctctggcctttggtctacacgcactagcctgatacacgtctcctccaccaggctgtaaacctcgtgaagtatcggttttat

SEQ ID NO: 20500 - DNA, 122 bp, Homo sapiens
  misc_feature (61)..(62): /note="This region represents a CpG dinucleotide"
  misc_feature (61)..(61): /note="Nucleotide may be methylated to form 5-methylcytosine"
tccctgacccccatcccccacgccctccctcctggccgcggaccaggcgtcccggccccccgccccacccctggaagacgccccgccagctccgcagtgcggaccccaccgaccctgcccca

SEQ ID NO: 20501 - DNA, 122 bp, Homo sapiens
  misc_feature (61)..(62): /note="This region represents a CpG dinucleotide"
  misc_feature (61)..(61): /note="Nucleotide may be methylated to form 5-methylcytosine"
acctgggaattagcctgaggtttagtccttaccctatcacttactagctatgtgactttgcgtaaattgtttactctgtttcctcatctgaggagatgatattaatacctcataggttcaaa

SEQ ID NO: 20502 - DNA, 122 bp, Homo sapiens
  misc_feature (61)..(62): /note="This region represents a CpG dinucleotide"
  misc_feature (61)..(61): /note="Nucleotide may be methylated to form 5-methylcytosine"
agctgggaccacaggcatgtgccaccacacccagctaatttttgtatttttttgtagagacggtgtttcgccatattgcccaagctggggttatgtcactttcaagactttgttacgaaaga

SEQ ID NO: 20503 - DNA, 122 bp, Homo sapiens
  misc_feature (61)..(62): /note="This region represents a CpG dinucleotide"
  misc_feature (61)..(61): /note="Nucleotide may be methylated to form 5-methylcytosine"
tttttttctcaggaaaaatcagaaaacttcccttgttctccttccttggcccctaattaacgtgactacccatgggaagagcagctgtgtcagccacttccctttcctgtctttttcaatga

SEQ ID NO: 20504 - DNA, 122 bp, Homo sapiens
  misc_feature (61)..(62): /note="This region represents a CpG dinucleotide"
  misc_feature (61)..(61): /note="Nucleotide may be methylated to form 5-methylcytosine"
ggaatcagaaaattctggagaggctgcttaggcaacagttttcaagtgtgacttgaaaggcgctgcatttcaaaaccccagggttatgagtgaagaggtgttgaatgaaaggctcttaattg

SEQ ID NO: 20505 - DNA, 122 bp, Homo sapiens
  misc_feature (61)..(62): /note="This region represents a CpG dinucleotide"
  misc_feature (61)..(61): /note="Nucleotide may be methylated to form 5-methylcytosine"
acttttcataatggttgcatcccagctctaaaatttgtttatttcttctttcacatactccgtcttttcagaaaggatttgatagagatgacacatttgttattgttcctaagctctggctt

SEQ ID NO: 20506 - DNA, 122 bp, Homo sapiens
  misc_feature (61)..(62): /note="This region represents a CpG dinucleotide"
  misc_feature (61)..(61): /note="Nucleotide may be methylated to form 5-methylcytosine"
gctaattaagcaccactgttgcttttactgcatctcatggtgattatctgtttacaaacccgtctcccacagtgaaccaccagttccacaaaagcagagaccacccctcacccgtgtctgaa

SEQ ID NO: 20507 - DNA, 122 bp, Homo sapiens
  misc_feature (61)..(62): /note="This region represents a CpG dinucleotide"
  misc_feature (61)..(61): /note="Nucleotide may be methylated to form 5-methylcytosine"
aggcaggtatagaagcctccggaccctggttactcattacattgtactaaatgctgatatcgcaaactctcataaataggccaaagggtagtaagtcaccaaaaggccaagccagacaaaca

SEQ ID NO: 20508 - DNA, 122 bp, Homo sapiens
  misc_feature (61)..(62): /note="This region represents a CpG dinucleotide"
  misc_feature (61)..(61): /note="Nucleotide may be methylated to form 5-methylcytosine"
ttactcctctcaaccaagcaatcaaacttagtatcacaaataatgggactgcacagtgtacgtctcctaatgggaggcatataaaatatattaaatcacttattaggtattcttgtccaaaa

SEQ ID NO: 20509 - DNA, 122 bp, Homo sapiens
  misc_feature (61)..(62): /note="This region represents a CpG dinucleotide"
  misc_feature (61)..(61): /note="Nucleotide may be methylated to form 5-methylcytosine"
accagatcggctttgagcgggagtggcacaaattcctgctggagtacattgcgcccatgacggagaagctctaccccggctactacaccagggtgggcaagcctggggcatagccaggatgc

SEQ ID NO: 20510 - DNA, 122 bp, Homo sapiens
  misc_feature (61)..(62): /note="This region represents a CpG dinucleotide"
  misc_feature (61)..(61): /note="Nucleotide may be methylated to form 5-methylcytosine"
gaaccaaaatagcatgttctttccaggctgtcaggaccctacttagtcatagacataatacgcttacctttacacttgctttgagtattgctcaacttagttgcatcatgggcctaccacat

SEQ ID NO: 20511 - DNA, 122 bp, Homo sapiens
  misc_feature (61)..(62): /note="This region represents a CpG dinucleotide"
  misc_feature (61)..(61): /note="Nucleotide may be methylated to form 5-methylcytosine"
aaactcctggatttaaatgatccacccacctcagcctcccaacatgctaggattatagcacgtttgaaattggcataataagcgtatctgcttcctaggattgtgatgagaactgaaaatat

SEQ ID NO: 20512 - DNA, 122 bp, Homo sapiens
  misc_feature (61)..(62): /note="This region represents a CpG dinucleotide"
  misc_feature (61)..(61): /note="Nucleotide may be methylated to form 5-methylcytosine"
gaacctatgtgcatttcaggctttctccagtctggctgaagctgcttatgaagctgcagacgttgctgatgatcaggaagaaccagctacttactgcttatcttcttcatttgaactcatag

SEQ ID NO: 20513 - DNA, 122 bp, Homo sapiens
  misc_feature (61)..(62): /note="This region represents a CpG dinucleotide"
  misc_feature (61)..(61): /note="Nucleotide may be methylated to form 5-methylcytosine"
aagctgcctgtggtcaccctgaacttgttgtgcctttaagagttgggcatgctggccaggcgcggtggctcatgcctgtaatcccagcacttcgggaggccgaggcgggtggatcacgaggt

SEQ ID NO: 20514 - DNA, 122 bp, Homo sapiens
  misc_feature (61)..(62): /note="This region represents a CpG dinucleotide"
  misc_feature (61)..(61): /note="Nucleotide may be methylated to form 5-methylcytosine"
ccttccagcgctggtagtctagacatcctagggattgactcaacttctcaatcctgggatcgccagagggaggcctgctggaggccagccctgggcagcttctgacaggccccagcttggac

SEQ ID NO: 20515 - DNA, 122 bp, Homo sapiens
  misc_feature (61)..(62): /note="This region represents a CpG dinucleotide"
  misc_feature (61)..(61): /note="Nucleotide may be methylated to form 5-methylcytosine"
gtgttgaaaagtggataattttaagcctatttacagatgaggaaacagagaccaagtaagcgcttaagtaatttgccccgggacatgtatcttttaagtgaccgagccagaatttaaatcca

SEQ ID NO: 20516 - DNA, 122 bp, Homo sapiens
  misc_feature (61)..(62): /note="This region represents a CpG dinucleotide"
  misc_feature (61)..(61): /note="Nucleotide may be methylated to form 5-methylcytosine"
aaccctggacaggtcctgacagattaccgagactgaggtttttaactcatcatccttgggcgtgcattaaagggtccatgaggcctttgaaagtatgtgtatgggtgtgtatacataattcc

SEQ ID NO: 20517 - DNA, 122 bp, Homo sapiens
  misc_feature (61)..(62): /note="This region represents a CpG dinucleotide"
  misc_feature (61)..(61): /note="Nucleotide may be methylated to form 5-methylcytosine"
tgcaaaatcactgtttctcatttatgggctccatcctagcgctcttactgattactcaaccgcaaccctgtcctgaactttattctttttttctgtgttggcctggatattgttgtttctct

SEQ ID NO: 20518 - DNA, 122 bp, Homo sapiens
  misc_feature (61)..(62): /note="This region represents a CpG dinucleotide"
  misc_feature (61)..(61): /note="Nucleotide may be methylated to form 5-methylcytosine"
aaaagcatctcagactcccctgtttggggtcatctgtcttcctcagggagccccaagagtcgtgagtaggttcctctcaggtcagaggtgctgctgtcttttacattgagatccctgatcgc

SEQ ID NO: 20519 - DNA, 122 bp, Homo sapiens
  misc_feature (61)..(62): /note="This region represents a CpG dinucleotide"
  misc_feature (61)..(61): /note="Nucleotide may be methylated to form 5-methylcytosine"
tcatgtgcttctggtggaagaataaattggtacaaccacattggggaacaatttgtagtacgtgtatgtaggagtcaagtcattattgacagcagaatgtcccagacattgttgaaaggggg

SEQ ID NO: 20520 - DNA, 122 bp, Homo sapiens
  misc_feature (61)..(62): /note="This region represents a CpG dinucleotide"
  misc_feature (61)..(61): /note="Nucleotide may be methylated to form 5-methylcytosine"
aacgcagcctttcatgggcataaacaagggccactgtgctctggcatacctgtggaccggcgacgtggcctgagagccatgcgtgttcacagtgctccctcttttcacgcacagaaacttac

SEQ ID NO: 20521 - DNA, 122 bp, Homo sapiens
  misc_feature (61)..(62): /note="This region represents a CpG dinucleotide"
  misc_feature (61)..(61): /note="Nucleotide may be methylated to form 5-methylcytosine"
gaacagctgtggggaagtggaggcagaaggcttggtgacaggttggatgtaagcactgtccgggatggaggagacttacactggctcttttttgaacagtggtgagatcccagccttttcat

SEQ ID NO: 20522 - DNA, 122 bp, Homo sapiens
  misc_feature (61)..(62): /note="This region represents a CpG dinucleotide"
  misc_feature (61)..(61): /note="Nucleotide may be methylated to form 5-methylcytosine"
ccagggctgctcagacagttccacagatgagtcaggatcccatactccttccagctttatcgcctgccaccgtaaggatgtggctctcgttagcattatctaagacggcagatggggctcta

SEQ ID NO: 20523 - DNA, 122 bp, Homo sapiens
  misc_feature (61)..(62): /note="This region represents a CpG dinucleotide"
  misc_feature (61)..(61): /note="Nucleotide may be methylated to form 5-methylcytosine"
cccttcacccaagcacataaacagggacaaaatgggaaggaggaattgtcctgctgattacggtgaactgaaccggcctgttgtgtagaaagaaccttatctccacttgttccaattcaaat

SEQ ID NO: 20524 - DNA, 122 bp, Homo sapiens
  misc_feature (61)..(62): /note="This region represents a CpG dinucleotide"
  misc_feature (61)..(61): /note="Nucleotide may be methylated to form 5-methylcytosine"
ctctgccccagtgtttattcctagtagcccatttagttctccccacaagctgatgaggtgcgtatgctgtcatcctcctttttcagacaaagcacagagcggtgaggtctcttgcctaaggt

SEQ ID NO: 20525 - DNA, 122 bp, Homo sapiens
  misc_feature (61)..(62): /note="This region represents a CpG dinucleotide"
  misc_feature (61)..(61): /note="Nucleotide may be methylated to form 5-methylcytosine"
tgcatctactacacacacacacacacacacacacacacacacacacacacacacacactgcgagtttattgccgttggaggaaaaaaatgaaagaatcaacagcagggaaagggatgcaatt

SEQ ID NO: 20526 - DNA, 122 bp, Homo sapiens
  misc_feature (61)..(62): /note="This region represents a CpG dinucleotide"
  misc_feature (61)..(61): /note="Nucleotide may be methylated to form 5-methylcytosine"
attttttgacagcatctcaagcaaactaagatgtctcttcagcatcagtctgactgctgccgctcctgatttcgtcaagcctgagtcagacctcagttctggacatcacagttattttaaag

SEQ ID NO: 20527 - DNA, 122 bp, Homo sapiens
  misc_feature (61)..(62): /note="This region represents a CpG dinucleotide"
  misc_feature (61)..(61): /note="Nucleotide may be methylated to form 5-methylcytosine"
tcagagatgcattctaaagggtcttctctattgctttttctcccaaatttaaacttaattcggtttgtctgtgtgcatttgcgtgaagaagtgaactgttgttttcatacgttaatgacagt

SEQ ID NO: 20528 - DNA, 122 bp, Homo sapiens
  misc_feature (61)..(62): /note="This region represents a CpG dinucleotide"
  misc_feature (61)..(61): /note="Nucleotide may be methylated to form 5-methylcytosine"
tagcaaaacagcacataacaaaatgtaccaccttgaccatttctaagtgtacagctcagtcgtggtaagtatagtcacattgttatgcaaccagtatccagaactttttcatcttgcaaaac

SEQ ID NO: 20529 - DNA, 122 bp, Homo sapiens
  misc_feature (61)..(62): /note="This region represents a CpG dinucleotide"
  misc_feature (61)..(61): /note="Nucleotide may be methylated to form 5-methylcytosine"
gaagttaatggttcaatcataaagttgtttatgttgaacttgcttaagatacttgggtaacgattgaaggacattttaggaagagcactcaaaatgcagtggattggagaaaaacagaacta

SEQ ID NO: 20530 - DNA, 122 bp, Homo sapiens
  misc_feature (61)..(62): /note="This region represents a CpG dinucleotide"
  misc_feature (61)..(61): /note="Nucleotide may be methylated to form 5-methylcytosine"
aattggcctcagggcaccactgatgaggctggagtgggagccactgaagcaataaagatgcgttcccaccccaggtttcagagagtaacaggcagaggctttgtagaacacaggaccgcaga

SEQ ID NO: 20531 - DNA, 122 bp, Homo sapiens
  misc_feature (61)..(62): /note="This region represents a CpG dinucleotide"
  misc_feature (61)..(61): /note="Nucleotide may be methylated to form 5-methylcytosine"
ggtctgggatgctgtccacagtcaccattcatctgacacaggcatgctatagtgtcacagcgctcacctccagagaggcccaggccgtggaaagaaggaaaactctgcacattcacttcctt

SEQ ID NO: 20532 - DNA, 122 bp, Homo sapiens
  misc_feature (61)..(62): /note="This region represents a CpG dinucleotide"
  misc_feature (61)..(61): /note="Nucleotide may be methylated to form 5-methylcytosine"
gagaacaagaaatgttttgtgtctttgcagactcccagggaagtgctttctcaccacagtcgctggaagggagaacattttcacaagtctctatttttgctaaatatttttaagagtgtaat

SEQ ID NO: 20533 - DNA, 122 bp, Homo sapiens
  misc_feature (61)..(62): /note="This region represents a CpG dinucleotide"
  misc_feature (61)..(61): /note="Nucleotide may be methylated to form 5-methylcytosine"
acatgtcaaactggcctaccttagccagatgtgatgggtgtggtccagtgttggagagtccggatctgtctcaggattgtgttaatacctggaacatgcacaaagatacatacatacctgga

SEQ ID NO: 20534 - DNA, 122 bp, Homo sapiens
  misc_feature (61)..(62): /note="This region represents a CpG dinucleotide"
  misc_feature (61)..(61): /note="Nucleotide may be methylated to form 5-methylcytosine"
ccttctcaaaaaataaataaaaggatactatggtgatacccagtttacactttgggaaaccgaggttgtcatttcactgaagtgaggtcactcgctcttgtatgactcaatatgactcttgt

SEQ ID NO: 20535 - DNA, 122 bp, Homo sapiens
  misc_feature (61)..(62): /note="This region represents a CpG dinucleotide"
  misc_feature (61)..(61): /note="Nucleotide may be methylated to form 5-methylcytosine"
agtgtccatgcgtcaccttgctggtgatgcttcactggatcacttggttccggggttgtccgcacgtctccctgtagtgcaggtgctccttcctgtttccaattagcctgtgggatgggact

SEQ ID NO: 20536 - DNA, 122 bp, Homo sapiens
  misc_feature (61)..(62): /note="This region represents a CpG dinucleotide"
  misc_feature (61)..(61): /note="Nucleotide may be methylated to form 5-methylcytosine"
tagggaagggaccatggagctccgaactacccctcagctgaaagtggtggggcagggccgcggcaatggagacccggggggtgggatggagaaggacggtccggaatgggacctttgacagc

SEQ ID NO: 20537 - DNA, 122 bp, Homo sapiens
  misc_feature (61)..(62): /note="This region represents a CpG dinucleotide"
  misc_feature (61)..(61): /note="Nucleotide may be methylated to form 5-methylcytosine"
tttaggagggtagaaattgcaacactatcttagctgcaattagctggcatttctgccaagcgctaatacatatttcaccctaacttccagtgaaggacgacattgataagaatatttgggga

SEQ ID NO: 20538 - DNA, 122 bp, Homo sapiens
  misc_feature (61)..(62): /note="This region represents a CpG dinucleotide"
  misc_feature (61)..(61): /note="Nucleotide may be methylated to form 5-methylcytosine"
tgcccaggtgataggtgtggtgtgcatgagtcctcagccctgcccaggtgacaggtgtcccgtgtgctggtcctcagctgtgcccaggcttgggctgtgggtgccgcccgttcccagtggac

SEQ ID NO: 20539 - DNA, 122 bp, Homo sapiens
  misc_feature (61)..(62): /note="This region represents a CpG dinucleotide"
  misc_feature (61)..(61): /note="Nucleotide may be methylated to form 5-methylcytosine"
aaaagttgttaggctggtatttctacatctcacatttgtcagcccctgccaaaatagtgacgcagcagtgtgttacctgctgacagcataatgcgaggcaaggtccagccattccacccggc

SEQ ID NO: 20540 - DNA, 122 bp, Homo sapiens
  misc_feature (61)..(62): /note="This region represents a CpG dinucleotide"
  misc_feature (61)..(61): /note="Nucleotide may be methylated to form 5-methylcytosine"
agctcagcacctctcacactccctgcctctcgaggactctgcttgttcctcatcacagcacggttgctctcgcacccaaggcggtgtccccccagcgcctcaccacgatcgcggcagagatc

SEQ ID NO: 20541 - DNA, 122 bp, Homo sapiens
  misc_feature (61)..(62): /note="This region represents a CpG dinucleotide"
  misc_feature (61)..(61): /note="Nucleotide may be methylated to form 5-methylcytosine"
atctttgccttgaggacacctgagaccccaaagccaggccacagtgaggaccttcatgcccgggactcaagggatggaagtccaatgccataatctcttctgatcttgagtccctgggccca

SEQ ID NO: 20542 - DNA, 122 bp, Homo sapiens
  misc_feature (61)..(62): /note="This region represents a CpG dinucleotide"
  misc_feature (61)..(61): /note="Nucleotide may be methylated to form 5-methylcytosine"
gaacagagcatgtgtggttcatgggactcactccagcagtgatgatacaatgctgctgcccgttcagtactgtgcctctacttaaccaaagctcctggaggacaggaactgtatctgactca

SEQ ID NO: 20543 - DNA, 122 bp, Homo sapiens
  misc_feature (61)..(62): /note="This region represents a CpG dinucleotide"
  misc_feature (61)..(61): /note="Nucleotide may be methylated to form 5-methylcytosine"
tggtcctctgtttccctatccgtagaatggagacggctactctgtgagaagcccgaggtgcgcaggacccaagtgaggagccggcaacctgaagtcctcaggatggggagggatccgaagga

SEQ ID NO: 20544 - DNA, 122 bp, Homo sapiens
  misc_feature (61)..(62): /note="This region represents a CpG dinucleotide"
  misc_feature (61)..(61): /note="Nucleotide may be methylated to form 5-methylcytosine"
ggttcacagcaaaatttagcagaaagtacagagagttcctgtatatcaccctgctccatacgcacacaacttgcacagcctcccccactattaacatcgtttacccaagcagtgcatttgtt

SEQ ID NO: 20545 - DNA, 122 bp, Homo sapiens
  misc_feature (61)..(62): /note="This region represents a CpG dinucleotide"
  misc_feature (61)..(61): /note="Nucleotide may be methylated to form 5-methylcytosine"
caaattctctaatgaacttcaagtgtttctagagtaaaatatactcttccattccagaaccgttagtacaactcttaattcaaccagaaaatggaaggcttacacatattcctttgaccaac

SEQ ID NO: 20546 - DNA, 122 bp, Homo sapiens
  misc_feature (61)..(62): /note="This region represents a CpG dinucleotide"
  misc_feature (61)..(61): /note="Nucleotide may be methylated to form 5-methylcytosine"
gtttttctaaataggtgcatttttaaatgatgatagtacactgaatcatgatttcaggaacgtcaggatcagattctccaggacaggctgtggaagctgaagaaatagtaaaacaacttgat

SEQ ID NO: 20547 - DNA, 122 bp, Homo sapiens
  misc_feature (61)..(62): /note="This region represents a CpG dinucleotide"
  misc_feature (61)..(61): /note="Nucleotide may be methylated to form 5-methylcytosine"
caacagtgtaaatggtaccaactgtcactgaataaaaggccagacagctgaaatggcccacgggaatttgaagaaactactggccctggcagcagcaagatatcctgaacctagtgcctggt

SEQ ID NO: 20548 - DNA, 122 bp, Homo sapiens
  misc_feature (61)..(62): /note="This region represents a CpG dinucleotide"
  misc_feature (61)..(61): /note="Nucleotide may be methylated to form 5-methylcytosine"
gagcgggggcgaggcggggtgttctgctgggccgggtctgggaggaattcgcgggaaatgcgggggcttaatgggggaaacagaggcagtatcaaatagacggcctgctgacatttttaaaa

SEQ ID NO: 20549 - DNA, 122 bp, Homo sapiens
  misc_feature (61)..(62): /note="This region represents a CpG dinucleotide"
  misc_feature (61)..(61): /note="Nucleotide may be methylated to form 5-methylcytosine"
tattcccaaataagcattagctttgggatctgtgggctagcagtttgggcttggttcagccggatgattttctgggctctgttgtgctcactcactcgtgtcgatagtgagccagcaggttg

SEQ ID NO: 20550 - DNA, 122 bp, Homo sapiens
  misc_feature (61)..(62): /note="This region represents a CpG dinucleotide"
  misc_feature (61)..(61): /note="Nucleotide may be methylated to form 5-methylcytosine"
aacttccatttcctctttgattacgactgaactagacttaagatcagtctctgcgccaggcgcagtggttcatgcctgtagtcccagctactcgggaggctgagacaagaagatcacttcag

SEQ ID NO: 20551 - DNA, 122 bp, Homo sapiens
  misc_feature (61)..(62): /note="This region represents a CpG dinucleotide"
  misc_feature (61)..(61): /note="Nucleotide may be methylated to form 5-methylcytosine"
ctttgcttacacaacttgtctgtcttgtctgggcagtagatactttctccaaacatagagcgggctggactgtaggattccatttgttactgaaatttcttctgcttcccctcatgaccaaa

SEQ ID NO: 20552 - DNA, 122 bp, Homo sapiens
  misc_feature (61)..(62): /note="This region represents a CpG dinucleotide"
  misc_feature (61)..(61): /note="Nucleotide may be methylated to form 5-methylcytosine"
agttcaaaagataaacaataagttgctctctacttgtagaagctgagggaaagctgatcacgagctaggtcaggttagccagctctgataccacaacttgtggtgaagtcagcagcacaaat

SEQ ID NO: 20553 - DNA, 122 bp, Homo sapiens
  misc_feature (61)..(62): /note="This region represents a CpG dinucleotide"
  misc_feature (61)..(61): /note="Nucleotide may be methylated to form 5-methylcytosine"
attacttccttgtttacctgccatgtccctggaagttcccatttatccagtaacaacctacgctaactggaagtgagttctgtgtctcatgtctgaagagaccctgtgaaggttcaggagag

SEQ ID NO: 20554 - DNA, 122 bp, Homo sapiens
  misc_feature (61)..(62): /note="This region represents a CpG dinucleotide"
  misc_feature (61)..(61): /note="Nucleotide may be methylated to form 5-methylcytosine"
cctctgagtcagcttccttaagaagaagtgggttcgaagggggttattaacaatataaatcgcccttcctgtcagtcaaatgctcagaaatgcaggacatgatactggccgttttggtgaca

SEQ ID NO: 20555 - DNA, 122 bp, Homo sapiens
  misc_feature (61)..(62): /note="This region represents a CpG dinucleotide"
  misc_feature (61)..(61): /note="Nucleotide may be methylated to form 5-methylcytosine"
tgaggaaacagtcttgcctcatgttggaggatgtgaaacaacagtctgattactaggagtcgttatgaataggtgaattatgtgctaaataatcatcagagtaattcagcatttattaattc

SEQ ID NO: 20556 - DNA, 122 bp, Homo sapiens
  misc_feature (61)..(62): /note="This region represents a CpG dinucleotide"
  misc_feature (61)..(61): /note="Nucleotide may be methylated to form 5-methylcytosine"
cagggctttggcccaaatttgtgtttgccccagagagcattttgggaggtgttcttggagcgactcacgtatttagcagtgagctatggctctgggccagatcctctgccgggggaaggggt

SEQ ID NO: 20557 - DNA, 122 bp, Homo sapiens
  misc_feature (61)..(62): /note="This region represents a CpG dinucleotide"
  misc_feature (61)..(61): /note="Nucleotide may be methylated to form 5-methylcytosine"
aaccactttaaataacaaatgtgttcctaggatagcaagatttgactggaccctgactgacgagattactatacctaaagaaagaacgcattcgtgagaaggagagttctgctcagttatga

SEQ ID NO: 20558 - DNA, 122 bp, Homo sapiens
  misc_feature (61)..(62): /note="This region represents a CpG dinucleotide"
  misc_feature (61)..(61): /note="Nucleotide may be methylated to form 5-methylcytosine"
tttccttttctgaaatacttgaattactgaatacagtcatctactaaattgcgacacccacgggaaaaaaacatgcatgctgtaggtgatgatgagtttgttattagctttactttgagatt

SEQ ID NO: 20559 - DNA, 122 bp, Homo sapiens
  misc_feature (61)..(62): /note="This region represents a CpG dinucleotide"
  misc_feature (61)..(61): /note="Nucleotide may be methylated to form 5-methylcytosine"
gaaggaagatctggggattcctattgtaatttttcagtagcaatttgtataactttatagcgagtaagcagtggagccagaatttataccaatattcattatatcaggtctcctaaccataa

SEQ ID NO: 20560 - DNA, 122 bp, Homo sapiens
  misc_feature (61)..(62): /note="This region represents a CpG dinucleotide"
  misc_feature (61)..(61): /note="Nucleotide may be methylated to form 5-methylcytosine"
agagtcctgcactcgggacatctgagttcatttcgagaacctacgatccccagcaaacatcgcttgcaaaacgtatgctggcaaggcaagaccttcgcagaagcatcaaggcgctctagaca

SEQ ID NO: 20561 - DNA, 122 bp, Homo sapiens
  misc_feature (61)..(62): /note="This region represents a CpG dinucleotide"
  misc_feature (61)..(61): /note="Nucleotide may be methylated to form 5-methylcytosine"
aaataagtagttttggaaaccacgaagtgctgtgccagtgatagttaccagctcctagtacgctgtctgccagccctggctggggctgaatgaatgaatgtgaataaccttccttctaaaat

SEQ ID NO: 20562 - DNA, 122 bp, Homo sapiens
  misc_feature (61)..(62): /note="This region represents a CpG dinucleotide"
  misc_feature (61)..(61): /note="Nucleotide may be methylated to form 5-methylcytosine"
tctccatttccggcaccagcacaaggctgttagtaactggtgctgtcagtggttcttcaccgcacggtcctgactcactcttgtgtcatgaacaatggtgaggcgtgttggagtcatttgct

SEQ ID NO: 20563 - DNA, 122 bp, Homo sapiens
  misc_feature (61)..(62): /note="This region represents a CpG dinucleotide"
  misc_feature (61)..(61): /note="Nucleotide may be methylated to form 5-methylcytosine"
tgtaaggaacatatgtaaaatcccattttgtaattgtgaaaactgaagactagggagactcgagtagtttaaccactttattaattagcttttgctgcattaggggcttaaagcagtaacca

SEQ ID NO: 20564 - DNA, 122 bp, Homo sapiens
  misc_feature (61)..(62): /note="This region represents a CpG dinucleotide"
  misc_feature (61)..(61): /note="Nucleotide may be methylated to form 5-methylcytosine"
gtgagattatggaactcctgagcctcttagattgcaaaagagaccaaacagttgaccttacggtttccagcagacatgggtcctggtacagtgttatgaaatctaatatttgtaatatagaa

SEQ ID NO: 20565 - DNA, 122 bp, Homo sapiens
  misc_feature (61)..(62): /note="This region represents a CpG dinucleotide"
  misc_feature (61)..(61): /note="Nucleotide may be methylated to form 5-methylcytosine"
cccggaggtacctcgaggagggcaagggtaatgaaatgaatgaaatgaacccctgcacagcgagggagcacttacaccctgacaccctcctgcagggagaaggaagatgacaaggatctctc

SEQ ID NO: 20566 - DNA, 122 bp, Homo sapiens
  misc_feature (61)..(62): /note="This region represents a CpG dinucleotide"
  misc_feature (61)..(61): /note="Nucleotide may be methylated to form 5-methylcytosine"
ataagttccctgacagagggagtcacttgtgtgtgtatgtggtatcctttcccatacctgcggtgttgggctcatggcatccacttaatgaacgcttgctgtcagtcattgatttggagtct

SEQ ID NO: 20567 - DNA, 122 bp, Homo sapiens
  misc_feature (61)..(62): /note="This region represents a CpG dinucleotide"
  misc_feature (61)..(61): /note="Nucleotide may be methylated to form 5-methylcytosine"
gcccctggtggtgttggtcacggtaaggctgggttggtgcaagtcctcatcattactgaacgttcagcctgaattacattccagggttggaaggggcctcttggagcataatcacattgttg

SEQ ID NO: 20568 - DNA, 122 bp, Homo sapiens
  misc_feature (61)..(62): /note="This region represents a CpG dinucleotide"
  misc_feature (61)..(61): /note="Nucleotide may be methylated to form 5-methylcytosine"
tgggactcagcctctgtatgttgaaaagcctagactagcctgcagaataatgagacattacgtgggccagtgcgagtcatttctgttactgtctgtgagaacacttagccaaaatctgcaaa

SEQ ID NO: 20569 - DNA, 122 bp, Homo sapiens
  misc_feature (61)..(62): /note="This region represents a CpG dinucleotide"
  misc_feature (61)..(61): /note="Nucleotide may be methylated to form 5-methylcytosine"
atgtttgtattttgaagacatttgtgaaaactttacagaggagataaacagtgactttcacgtctcatttagccagtttgcacagagagaaagaggtcagagtctgactggtaggaaattct

SEQ ID NO: 20570 - DNA, 122 bp, Homo sapiens
  misc_feature (61)..(62): /note="This region represents a CpG dinucleotide"
  misc_feature (61)..(61): /note="Nucleotide may be methylated to form 5-methylcytosine"
tcaaggcaaattcttttcctaattaaaggctggtctccacagctgtcattggggtgacctcgctaattcaaataaatagccacagggtttcaaagggaacagttttaactctgctttccata

SEQ ID NO: 20571 - DNA, 122 bp, Homo sapiens
  misc_feature (61)..(62): /note="This region represents a CpG dinucleotide"
  misc_feature (61)..(61): /note="Nucleotide may be methylated to form 5-methylcytosine"
tcttgaccatcactgtctatgctgttgtttgttttggcacaactggctttatttcaagctcgttctgtctagtttataatctctatcaacatatcagttatctgcattgccctacttactcc

SEQ ID NO: 20572 - DNA, 122 bp, Homo sapiens
  misc_feature (61)..(62): /note="This region represents a CpG dinucleotide"
  misc_feature (61)..(61): /note="Nucleotide may be methylated to form 5-methylcytosine"
acactagctctggagctaggacgagttcataacgaacttcagacatacactttcatcacacgaaaacacttcctgggcgctgctccggtggaaagccacagactccactccgagggcaacct

SEQ ID NO: 20573 - DNA, 122 bp, Homo sapiens
  misc_feature (61)..(62): /note="This region represents a CpG dinucleotide"
  misc_feature (61)..(61): /note="Nucleotide may be methylated to form 5-methylcytosine"
cttggccatgaatagcatttacagaactgtaataatgtaagcactgcatattgagctaaacgaaggacaaagaactgcacagcaaagacaggataggaaacttgaacgtgtgtagtggagat

SEQ ID NO: 20574 - DNA, 122 bp, Homo sapiens
  misc_feature (61)..(62): /note="This region represents a CpG dinucleotide"
  misc_feature (61)..(61): /note="Nucleotide may be methylated to form 5-methylcytosine"
ctatttctgtctcctttttatagctaagggaactgaaccacagacaggttaagtggcttgcgcaagattgcacagccagtaagtagtagagccagcttcgaaatccaggcactcttgcagca

SEQ ID NO: 20575 - DNA, 122 bp, Homo sapiens
  misc_feature (61)..(62): /note="This region represents a CpG dinucleotide"
  misc_feature (61)..(61): /note="Nucleotide may be methylated to form 5-methylcytosine"
ttttttttttttttgagatggagttttgatcttgtcacccagggtggagtgcagcgatctcggctcactgcaagctccgcctcctgggttcaagcgattctcctgcctcagcctcctgagta

SEQ ID NO: 20576 - DNA, 122 bp, Homo sapiens
  misc_feature (61)..(62): /note="This region represents a CpG dinucleotide"
  misc_feature (61)..(61): /note="Nucleotide may be methylated to form 5-methylcytosine"
tttacaacatggaggcaggtgccgtctctagtgaggctgctacagtccgacagaaactgacgtcagcagtaaataataaaatttagaatacataattaactatagagtttattggaacacaa

SEQ ID NO: 20577 - DNA, 122 bp, Homo sapiens
  misc_feature (61)..(62): /note="This region represents a CpG dinucleotide"
  misc_feature (61)..(61): /note="Nucleotide may be methylated to form 5-methylcytosine"
atttgtcattcaacaggagagttttaatccatgtaatctctctgagtctctgttttaccacggataagatggggataatactatctagcatcttgaagaactatttgaggattagaagtaat

SEQ ID NO: 20578 - DNA, 122 bp, Homo sapiens
  misc_feature (61)..(62): /note="This region represents a CpG dinucleotide"
  misc_feature (61)..(61): /note="Nucleotide may be methylated to form 5-methylcytosine"
aaggtacaaaagagtgactccctggttcttggtgttgcaaccccgggatgatgagtcaaccgtgctcgctcagctgagaatactgctctttctctcactgtcctcaaggaagaatgtggaaa

SEQ ID NO: 20579 - DNA, 122 bp, Homo sapiens
  misc_feature (61)..(62): /note="This region represents a CpG dinucleotide"
  misc_feature (61)..(61): /note="Nucleotide may be methylated to form 5-methylcytosine"
tgtggatagtcctacctcaccctggtcaacctacatgatccttaagctaatggcgaatcacgatgaccttgtagacatgcacacaactatacctttgtccaacagatcataatatatctgct

SEQ ID NO: 20580 - DNA, 122 bp, Homo sapiens
  misc_feature (61)..(62): /note="This region represents a CpG dinucleotide"
  misc_feature (61)..(61): /note="Nucleotide may be methylated to form 5-methylcytosine"
gtatgtggatagactgttgatgtaaaatttagccataaaaattttttggcttcaaacttacgtaggaaatttgttatagcttgttgaagagcagcgtgaataaaacaggaagcacaaaaaat

SEQ ID NO: 20581 - DNA, 122 bp, Homo sapiens
  misc_feature (61)..(62): /note="This region represents a CpG dinucleotide"
  misc_feature (61)..(61): /note="Nucleotide may be methylated to form 5-methylcytosine"
accaaatggaatcttgaagcctaaaccctcacatgactcagtcataaggttttggacttacgtagtcttatctgaggaactcagagtgcatccgcttcattaatgcttgctcacaatattct

SEQ ID NO: 20582 - DNA, 122 bp, Homo sapiens
  misc_feature (61)..(62): /note="This region represents a CpG dinucleotide"
  misc_feature (61)..(61): /note="Nucleotide may be methylated to form 5-methylcytosine"
gctccacccccaacactcccaccaaggtcaccaatgctgacccaatgtgacaaagccatgcgtcctgtggcctcagctgccggcatctgtcccagatgtacacacagatgctgttggtgatt

SEQ ID NO: 20583 - DNA, 122 bp, Homo sapiens
  misc_feature (61)..(62): /note="This region represents a CpG dinucleotide"
  misc_feature (61)..(61): /note="Nucleotide may be methylated to form 5-methylcytosine"
gtcaaggagggctggctacaggcagagtggatttcataaatcaccatcccctcttaaatgcgtgcttcacctttttactattttaagtatgattttctcaggttaaaaaaacttttccccaa

SEQ ID NO: 20584 - DNA, 122 bp, Homo sapiens
  misc_feature (61)..(62): /note="This region represents a CpG dinucleotide"
  misc_feature (61)..(61): /note="Nucleotide may be methylated to form 5-methylcytosine"
aggtggccactgttagatgtaagtctctttgccaggtagccaaggccctatgtaatgaaacgtactgtcccactagacttcctctccacttcactctcttgttccagcaggacagcctccca

SEQ ID NO: 20585 - DNA, 122 bp, Homo sapiens
  misc_feature (61)..(62): /note="This region represents a CpG dinucleotide"
  misc_feature (61)..(61): /note="Nucleotide may be methylated to form 5-methylcytosine"
ctcggcagtcacccgccagcgttcctgtagggcccagggcaggactgagagcgtggttcccgccctgaggatcacgcctggccactccctgagaagctgcatgaacccaccagtgtctccca

SEQ ID NO: 20586 - DNA, 122 bp, Homo sapiens
  misc_feature (61)..(62): /note="This region represents a CpG dinucleotide"
  misc_feature (61)..(61): /note="Nucleotide may be methylated to form 5-methylcytosine"
agtagactggcaatcaagaaagtggacagggcccattgctgggtggggtttggggctttacgactgcagtctggcatatgcaatctggcgtatgtggtcaaatcaagcttatgtgtgaatgc

SEQ ID NO: 20587 - DNA, 122 bp, Homo sapiens
  misc_feature (61)..(62): /note="This region represents a CpG dinucleotide"
  misc_feature (61)..(61): /note="Nucleotide may be methylated to form 5-methylcytosine"
cctcagctcaaaactctaaacacacattccagtgtgtctgccataaagggtcattctcagcgtaggcttaagttatatactgaattggcgtaggccatgaccttaagttaaattattgctgt

SEQ ID NO: 20588 - DNA, 122 bp, Homo sapiens
  misc_feature (61)..(62): /note="This region represents a CpG dinucleotide"
  misc_feature (61)..(61): /note="Nucleotide may be methylated to form 5-methylcytosine"
cctgccatagagaggaagcttagcaaagagatttagatcagtattcagaggaagttgaggcgtgagaaaagagagagcacgtggcagtgttggctcccagttgcaggtgtccagggtcacac

SEQ ID NO: 20589 - DNA, 122 bp, Homo sapiens
  misc_feature (61)..(62): /note="This region represents a CpG dinucleotide"
  misc_feature (61)..(61): /note="Nucleotide may be methylated to form 5-methylcytosine"
cgctctgccgccggctctgtgcgcggctgggccgggcagctccaagggttccgagagctgcgcgtcttggggctggggcggaccagcccagcccagcgggcactgatggggtcctgggagcc

SEQ ID NO: 20590 - DNA, 122 bp, Homo sapiens
  misc_feature (61)..(62): /note="This region represents a CpG dinucleotide"
  misc_feature (61)..(61): /note="Nucleotide may be methylated to form 5-methylcytosine"
gagaggaatagagtgggggtgggagaagtggggagcagagagagacagagaatgaactagcggaaagcaagcaagtcagcttttagaagtagacctgaagccctagcaacactgaaaagaga

SEQ ID NO: 20591 - DNA, 122 bp, Homo sapiens
  misc_feature (61)..(62): /note="This region represents a CpG dinucleotide"
  misc_feature (61)..(61): /note="Nucleotide may be methylated to form 5-methylcytosine"
acagacagtcacacactaggatttaataagccttgagtactgaacacctacagcaggtcacgcttagtcacaccatgctgagtctgcctttttcctggattcagaagtcacatcagacctga

SEQ ID NO: 20592 - DNA, 122 bp, Homo sapiens
  misc_feature (61)..(62): /note="This region represents a CpG dinucleotide"
  misc_feature (61)..(61): /note="Nucleotide may be methylated to form 5-methylcytosine"
caggttgttgaaactttggctctaactatatgaagtgaattgtttttttactggtgttttcgctgtgtaaatattgtattcagtctgagtttacaagaagcaaataacttagcctattctgg

SEQ ID NO: 20593 - DNA, 122 bp, Homo sapiens
  misc_feature (61)..(62): /note="This region represents a CpG dinucleotide"
  misc_feature (61)..(61): /note="Nucleotide may be methylated to form 5-methylcytosine"
catgaatgtgaggatgttctcattcattcctgcttacccagatatgtggagagacctctgcgtcttggtttgggggtcatgtgtattgttcccccatgccatttcttcatgaccggccagaa

SEQ ID NO: 20594 - DNA, 122 bp, Homo sapiens
  misc_feature (61)..(62): /note="This region represents a CpG dinucleotide"
  misc_feature (61)..(61): /note="Nucleotide may be methylated to form 5-methylcytosine"
tatgaagcaataggaaacacagagccgtcagagcgggaaagccctggaggcacgagtcagcgatgacaccacagggtattcaaggagcaccaatggcctgcaggtggcagaaacaatggagg

SEQ ID NO: 20595 - DNA, 122 bp, Homo sapiens
  misc_feature (61)..(62): /note="This region represents a CpG dinucleotide"
  misc_feature (61)..(61): /note="Nucleotide may be methylated to form 5-methylcytosine"
tggccaagtgagctggaggatccatgcctgagggcccacagatgactcggcaaagacagacgcatggagaaccaggcacatcccagactccacaccagcttgacattgttgaatcctcaaat

SEQ ID NO: 20596 - DNA, 122 bp, Homo sapiens
  misc_feature (61)..(62): /note="This region represents a CpG dinucleotide"
  misc_feature (61)..(61): /note="Nucleotide may be methylated to form 5-methylcytosine"
cgaactcctgacctcaggtgatccacctgcttcagcctcccaaagtgctggaattacaggcgtgagtgaccgcacccagccagccaagaccatctcttaagagcacaaaggcaaggcagctg

SEQ ID NO: 20597 - DNA, 122 bp, Homo sapiens
  misc_feature (61)..(62): /note="This region represents a CpG dinucleotide"
  misc_feature (61)..(61): /note="Nucleotide may be methylated to form 5-methylcytosine"
acattattttaataaggtcagagccatggctttaatctatccatttgtcagttaatgtcacgcaattccatgatcacagaccagactagtcccaggcaattgtctcagaaatgactataagt

SEQ ID NO: 20598 - DNA, 122 bp, Homo sapiens
  misc_feature (61)..(62): /note="This region represents a CpG dinucleotide"
  misc_feature (61)..(61): /note="Nucleotide may be methylated to form 5-methylcytosine"
ctttctacatgcgatggagaaaacagttcacctgggcatttttgctatgacaggaggaaacgtcaatatcaaaccattggagaaggtagctgagtcattcatttgtggcagcaaccatcttt

SEQ ID NO: 20599 - DNA, 122 bp, Homo sapiens
  misc_feature (61)..(62): /note="This region represents a CpG dinucleotide"
  misc_feature (61)..(61): /note="Nucleotide may be methylated to form 5-methylcytosine"
ttgtgactttgagggagccacttcactttgtggaatcccagattcttcatttgtagaccacggctatcctgctttctatctgctgctggctgtggttgattgtgtggctctagaggaagcac

SEQ ID NO: 20600 - DNA, 122 bp, Homo sapiens
  misc_feature (61)..(62): /note="This region represents a CpG dinucleotide"
  misc_feature (61)..(61): /note="Nucleotide may be methylated to form 5-methylcytosine"
acttattttgaataatggaaaaaagaggtaaaagatgttgacccctgcctgacaggaacacgctcaaaagcagaactggtccccagggaccgccccagctccacagtagcgccaagccctgc

SEQ ID NO: 20601 - DNA, 122 bp, Homo sapiens
  misc_feature (61)..(62): /note="This region represents a CpG dinucleotide"
  misc_feature (61)..(61): /note="Nucleotide may be methylated to form 5-methylcytosine"
gctgatgatagagatcatctcttgaaacttttcgttcctatgaaaagaacttcctcataccgctttgtttcttctcagacaccttcaatatattatttttctctgccacccctctaaggcta

SEQ ID NO: 20602 - DNA, 122 bp, Homo sapiens
  misc_feature (61)..(62): /note="This region represents a CpG dinucleotide"
  misc_feature (61)..(61): /note="Nucleotide may be methylated to form 5-methylcytosine"
aatagggatatgaaataagatgtaaatcatcactctgcacaaagagtatgtatgcacatgcgtgcgagcacacacaggccagtttccggaagtctgcatgtcacacagagtatagataagga

SEQ ID NO: 20603 - DNA, 122 bp, Homo sapiens
  misc_feature (61)..(62): /note="This region represents a CpG dinucleotide"
  misc_feature (61)..(61): /note="Nucleotide may be methylated to form 5-methylcytosine"
tcctccagccttcactctccctagccctagagggcactccctccctgggaatggagcactcgggctctagcttcccagagagaagagagcccaggatccctaacaaaagatggggagaaggg

SEQ ID NO: 20604 - DNA, 122 bp, Homo sapiens
  misc_feature (61)..(62): /note="This region represents a CpG dinucleotide"
  misc_feature (61)..(61): /note="Nucleotide may be methylated to form 5-methylcytosine"
aatcatctgtggctacattttcatatctggctggctcttttctgatgcctagcacatacccgtctgacttcaaattaccctcactatgaaaccagttcctgaaacgagaatatcggtcaatt

SEQ ID NO: 20605 - DNA, 122 bp, Homo sapiens
  misc_feature (61)..(62): /note="This region represents a CpG dinucleotide"
  misc_feature (61)..(61): /note="Nucleotide may be methylated to form 5-methylcytosine"
ccggctgaagaagcaggcttcttttctggaagcagagggcggtgcaaagaccttgagcggcggccggccgggcgcaggcccggagctggagctgggcacagctggcagcccaggtggggccc

SEQ ID NO: 20606 - DNA, 122 bp, Homo sapiens
  misc_feature (61)..(62): /note="This region represents a CpG dinucleotide"
  misc_feature (61)..(61): /note="Nucleotide may be methylated to form 5-methylcytosine"
tctttctttctttttgagatagggtccttttcttttgtcacccaggctggagtgcagtggcgcaatcgtggctcactgagcaacacagtgagcaacatagtgagacctcatttacatacaca

SEQ ID NO: 20607 - DNA, 122 bp, Homo sapiens
  misc_feature (61)..(62): /note="This region represents a CpG dinucleotide"
  misc_feature (61)..(61): /note="Nucleotide may be methylated to form 5-methylcytosine"
gaatgcactcaattgcctaatagttctcgtcaccttgtgtttcagtagccctatgactaacgctctcttctgactcaatgttttcttacatacaaggtcccaaggtacaagggttagtctgt

SEQ ID NO: 20608 - DNA, 122 bp, Homo sapiens
  misc_feature (61)..(62): /note="This region represents a CpG dinucleotide"
  misc_feature (61)..(61): /note="Nucleotide may be methylated to form 5-methylcytosine"
tgacatctgaacgcagcagcatgtgtgatgagcctgcaggtcttgcgggagcttcagaagcgcgggctgacctgtgacttgacatttccctgcggcgtgcagatctctcagttttcctttcc

SEQ ID NO: 20609 - DNA, 122 bp, Homo sapiens
  misc_feature (61)..(62): /note="This region represents a CpG dinucleotide"
  misc_feature (61)..(61): /note="Nucleotide may be methylated to form 5-methylcytosine"
aaatgtccagagtgtttatctcctggggccctgccagctagtatttacagaaactcacctcgttccagcttcctcttccctcactctcacaccaaggcagggtcctcttgtcctgtaggggt

SEQ ID NO: 20610 - DNA, 122 bp, Homo sapiens
  misc_feature (61)..(62): /note="This region represents a CpG dinucleotide"
  misc_feature (61)..(61): /note="Nucleotide may be methylated to form 5-methylcytosine"
tgtccctgtccctcccaaagcacagagcacagaaatgaggccgtttacatggcgagtctccgtgctggtgtttaagtcattaaaaagatactcaaagagaatggcctgcctgatgcgtcctt

SEQ ID NO: 20611 - DNA, 122 bp, Homo sapiens
  misc_feature (61)..(62): /note="This region represents a CpG dinucleotide"
  misc_feature (61)..(61): /note="Nucleotide may be methylated to form 5-methylcytosine"
gcctcattaaggaacagttaaagatctgatcacatctttgaactggggactcctgaatcccgtgaccactgagaatgaagacatttgctcatctcacatgtcttttccatttctctctacta

SEQ ID NO: 20612 - DNA, 122 bp, Homo sapiens
  misc_feature (61)..(62): /note="This region represents a CpG dinucleotide"
  misc_feature (61)..(61): /note="Nucleotide may be methylated to form 5-methylcytosine"
tggtgagcttcactgaagacagggctgtggcctttcttgcctatcctacaaaacatggcacgtacagcacataatagatcctcattaagtatgagttaaattgagtccagactagctggctg

SEQ ID NO: 20613 - DNA, 122 bp, Homo sapiens
  misc_feature (61)..(62): /note="This region represents a CpG dinucleotide"
  misc_feature (61)..(61): /note="Nucleotide may be methylated to form 5-methylcytosine"
caaagctctttattggaagttattcacaaatcttcatgatggtttttggacgactagtcacgtgtggtgttgccctatttcaaatgagtcagagaaattgtgctttatatgaattcatgcat

SEQ ID NO: 20614 - DNA, 122 bp, Homo sapiens
  misc_feature (61)..(62): /note="This region represents a CpG dinucleotide"
  misc_feature (61)..(61): /note="Nucleotide may be methylated to form 5-methylcytosine"
tgctggtgatgctgtatctgctgctctcatcttgtgatctgaggagaacctgctggaaggcgagcactgacctgctgtgtgtggccaagcagaaagggagcagacgaacttagattctgggg

SEQ ID NO: 20615 - DNA, 122 bp, Homo sapiens
  misc_feature (61)..(62): /note="This region represents a CpG dinucleotide"
  misc_feature (61)..(61): /note="Nucleotide may be methylated to form 5-methylcytosine"
ctggatcaaaggatgtgaacttttttctctctctcttttttaagatctgtgctaaacctccgtagaacattttttcagaccagagttttccttttttaacccttgtgctcttctcagtataa

SEQ ID NO: 20616 - DNA, 122 bp, Homo sapiens
  misc_feature (61)..(62): /note="This region represents a CpG dinucleotide"
  misc_feature (61)..(61): /note="Nucleotide may be methylated to form 5-methylcytosine"
atactacctcactgaagaaaaatcataaaactctcaggattcctccacaaatatttgccacgtgtcagttgcttgtgtaattgacttgtgaaactgcttcatgaaacagaaactgttgcatt

SEQ ID NO: 20617 - DNA, 122 bp, Homo sapiens
  misc_feature (61)..(62): /note="This region represents a CpG dinucleotide"
  misc_feature (61)..(61): /note="Nucleotide may be methylated to form 5-methylcytosine"
gattatttagttaatcctcataataactttgagcagtagatacagaaactgaaaagtaaacggcagaggcaggctaaaaagctaggtctgactcaaagggttttaatctcttaactaccaca

SEQ ID NO: 20618 - DNA, 122 bp, Homo sapiens
  misc_feature (61)..(62): /note="This region represents a CpG dinucleotide"
  misc_feature (61)..(61): /note="Nucleotide may be methylated to form 5-methylcytosine"
tcctaccttatgtggatgggttccatcttattttcaatgtcctcctgttgcagaagcttccggttagtcctgggactaaagggcaattgacctcactcctcctgggtctgactgactaatct

SEQ ID NO: 20619 - DNA, 122 bp, Homo sapiens
  misc_feature (61)..(62): /note="This region represents a CpG dinucleotide"
  misc_feature (61)..(61): /note="Nucleotide may be methylated to form 5-methylcytosine"
aaacttccttcagaaagcaacagctgctgctatttaaagatttccctgaaatcaactgcccggaaagttgagctggtttaattgtgaggtcctccgggctcgggctcagcagagagggtggg

SEQ ID NO: 20620 - DNA, 122 bp, Homo sapiens
  misc_feature (61)..(62): /note="This region represents a CpG dinucleotide"
  misc_feature (61)..(61): /note="Nucleotide may be methylated to form 5-methylcytosine"
gctccatggaagacacaaaagattctacaattattgaattaaccacaaatctaccaaggccgtggctactatttggaaagcaatttcatgacaagtggaaaccaagtgctctgacattatgc

SEQ ID NO: 20621 - DNA, 122 bp, Homo sapiens
  misc_feature (61)..(62): /note="This region represents a CpG dinucleotide"
  misc_feature (61)..(61): /note="Nucleotide may be methylated to form 5-methylcytosine"
gccgctattccttgatattggaatttaaaataattaaagtctcagtcacaagtgctaagacgagatcctctaggtcacagcagccacagtctgacccaaagggcttagcataaaaagtggtg

SEQ ID NO: 20622 - DNA, 122 bp, Homo sapiens
  misc_feature (61)..(62): /note="This region represents a CpG dinucleotide"
  misc_feature (61)..(61): /note="Nucleotide may be methylated to form 5-methylcytosine"
acaagactttgcagcagccactataaagtggcttcaagaatttacttgaacagtgtccatcgaaatgtgaatgtataccaaacagccagtgtggacttagactggaggacttagactggatt

SEQ ID NO: 20623 - DNA, 122 bp, Homo sapiens
  misc_feature (61)..(62): /note="This region represents a CpG dinucleotide"
  misc_feature (61)..(61): /note="Nucleotide may be methylated to form 5-methylcytosine"
atctgctttgtaaccctatgtaaataatacgtgactcaggatagcatgccccaaaattcacgtccacctggatttcagaacaggactttatttggaaatagggcctttactgatgtaattca

SEQ ID NO: 20624 - DNA, 122 bp, Homo sapiens
  misc_feature (61)..(62): /note="This region represents a CpG dinucleotide"
  misc_feature (61)..(61): /note="Nucleotide may be methylated to form 5-methylcytosine"
gcgggcccatggggaggggcggggtcgtgggcggggacgggattggtaccgcagggagaacgggcggcgccctttgacccagctcctcacctctgtcgcagtggccccgaggttcgagtctt

SEQ ID NO: 20625 - DNA, 122 bp, Homo sapiens
  misc_feature (61)..(62): /note="This region represents a CpG dinucleotide"
  misc_feature (61)..(61): /note="Nucleotide may be methylated to form 5-methylcytosine"
tggaacctggttcggtactgggggaagatgctctcccctaacccttccagatactgtgcacggagatcacaggaagcctagactcaagctgtcatttaaggtcctcagggggctgtgctgac

SEQ ID NO: 20626 - DNA, 122 bp, Homo sapiens
  misc_feature (61)..(62): /note="This region represents a CpG dinucleotide"
  misc_feature (61)..(61): /note="Nucleotide may be methylated to form 5-methylcytosine"
tagcccctgccttcctctctgacattacctgctacctgctactgctctccttgcttttttcgctccatccatatgacttcctctttctcaaacaccctgagctccttctgcctcagagactt

SEQ ID NO: 20627 - DNA, 122 bp, Homo sapiens
  misc_feature (61)..(62): /note="This region represents a CpG dinucleotide"
  misc_feature (61)..(61): /note="Nucleotide may be methylated to form 5-methylcytosine"
ctgatactagatggaaatagaaacaaagagacagctttctctataaccatgttttcttctcgtcctgaagggcaatggctcctccctatggacagagaaacagttgaaataaagatcagctt

SEQ ID NO: 20628 - DNA, 122 bp, Homo sapiens
  misc_feature (61)..(62): /note="This region represents a CpG dinucleotide"
  misc_feature (61)..(61): /note="Nucleotide may be methylated to form 5-methylcytosine"
accacggagacgccccaggaggccctgtggtcgagacttttatagtcccgcaatggtagtcgcaggcagcccttttcctgaccaggccgtctctgcctgcaccattgtccttgcttaggcgg

SEQ ID NO: 20629 - DNA, 122 bp, Homo sapiens
  misc_feature (61)..(62): /note="This region represents a CpG dinucleotide"
  misc_feature (61)..(61): /note="Nucleotide may be methylated to form 5-methylcytosine"
taagcaggctgtcagagccttaacaaggttctgagcccaggactgaggtaggggttacttcgggctgaggggattagcaaaggcttgtgaagtggctaaagccgtgacctggatatttcagg

SEQ ID NO: 20630 - DNA, 122 bp, Homo sapiens
  misc_feature (61)..(62): /note="This region represents a CpG dinucleotide"
  misc_feature (61)..(61): /note="Nucleotide may be methylated to form 5-methylcytosine"
caggtgctgcctcaccagggatatccaaggcataaccttggacaagtcatgtggctccctcggtgtctcattgtcttcctgtgtaagacagggctgttgaagcttgcttggctatgaagatt

SEQ ID NO: 20631 - DNA, 122 bp, Homo sapiens
  misc_feature (61)..(62): /note="This region represents a CpG dinucleotide"
  misc_feature (61)..(61): /note="Nucleotide may be methylated to form 5-methylcytosine"
caaatgtgttaagctgtgttgcaaaatggtctactaccacacccatgtaatctcttgatccggagctcttaaaatgctttattaatctgatgactaggtatagcaaagtggaaaaagcagac

SEQ ID NO: 20632 - DNA, 122 bp, Homo sapiens
  misc_feature (61)..(62): /note="This region represents a CpG dinucleotide"
  misc_feature (61)..(61): /note="Nucleotide may be methylated to form 5-methylcytosine"
tggaatcctctttcaggtaccaaatgtcaccatactttttattccatagcacggctcccacgcagctcactacagacatgaccagagcagcaggaaccaaagggagacccgcccattgtcac

SEQ ID NO: 20633 - DNA, 122 bp, Homo sapiens
  misc_feature (61)..(62): /note="This region represents a CpG dinucleotide"
  misc_feature (61)..(61): /note="Nucleotide may be methylated to form 5-methylcytosine"
ggcaaaaaccaaacgtcggaaacaagtaggtcccgactttatttcgcacacagtgccactcgctgtcttcctcagctcgagctggataaagaaacatctcatggtttattttccaggttgta

SEQ ID NO: 20634 - DNA, 122 bp, Homo sapiens
  misc_feature (61)..(62): /note="This region represents a CpG dinucleotide"
  misc_feature (61)..(61): /note="Nucleotide may be methylated to form 5-methylcytosine"
aagacaggagttaacccaagaatgacaaacttccttgacttggcgatttagaaaaaattacggcccagtttggtcagctaagaggcacacccaagaaacagctttgaagtatgtaggggtaa

SEQ ID NO: 20635 - DNA, 122 bp, Homo sapiens
  misc_feature (61)..(62): /note="This region represents a CpG dinucleotide"
  misc_feature (61)..(61): /note="Nucleotide may be methylated to form 5-methylcytosine"
gcctcctatctcccgcatgttcccagaggcaaagcagctgctctgctgacggtgctcaggcgttgaccactcctttgatgtacaggcctgtgggtttgaagggctgtttgctttcacgtcct

SEQ ID NO: 20636 - DNA, 122 bp, Homo sapiens
  misc_feature (61)..(62): /note="This region represents a CpG dinucleotide"
  misc_feature (61)..(61): /note="Nucleotide may be methylated to form 5-methylcytosine"
catctactcacctttcaagtttctcatgccagtgcctgactccattagttacccatattacgcatgtgaaaaacctggtggcacctaagatgtcttcatctcccacagcccctacttacaat

SEQ ID NO: 20637 - DNA, 122 bp, Homo sapiens
  misc_feature (61)..(62): /note="This region represents a CpG dinucleotide"
  misc_feature (61)..(61): /note="Nucleotide may be methylated to form 5-methylcytosine"
gaaatacatatcagaccgcatacctctctgctcttcctctaaggattccccttttgtcctcgggatggtttccaagctccttagcaagctaaacaaggccccttgaaggctgccgtctccac

SEQ ID NO: 20638 - DNA, 122 bp, Homo sapiens
  misc_feature (61)..(62): /note="This region represents a CpG dinucleotide"
  misc_feature (61)..(61): /note="Nucleotide may be methylated to form 5-methylcytosine"
tctatgacatacaaaggtcatttttggtctcttcctgcatatcttaccagcctaatctctcgtcacttctctcgcatactatttgccagtttctctgaagtttcctgttctctctgcctcca

SEQ ID NO: 20639 - DNA, 122 bp, Homo sapiens
  misc_feature (61)..(62): /note="This region represents a CpG dinucleotide"
  misc_feature (61)..(61): /note="Nucleotide may be methylated to form 5-methylcytosine"
ccatatcaatgtagagaattatgaaacacaggtgggagtcagtagaaagtgaagaaacagcgccacaaatgagtaaagcaggtctagcaggcttgtctgttgagttactgactactggcatg

SEQ ID NO: 20640 - DNA, 122 bp, Homo sapiens
  misc_feature (61)..(62): /note="This region represents a CpG dinucleotide"
  misc_feature (61)..(61): /note="Nucleotide may be methylated to form 5-methylcytosine"
tggatttataaatatgagaactcggaggcaggcagaagtcatgagcaaagcatgtgacaacgaggactgctgagcagagggctgtcctcactcatgagttttcattataccagtcccgtagt

SEQ ID NO: 20641 - DNA, 122 bp, Homo sapiens
  misc_feature (61)..(62): /note="This region represents a CpG dinucleotide"
  misc_feature (61)..(61): /note="Nucleotide may be methylated to form 5-methylcytosine"
gttatataaccgttccccttggcttacaatcaaacttccagattagctggaggtgccctgcgcaagttaggagttggtgtgggggtgagccacgtgaccgagcctggcttcctggttggggc

SEQ ID NO: 20642 - DNA, 122 bp, Homo sapiens
  misc_feature (61)..(62): /note="This region represents a CpG dinucleotide"
  misc_feature (61)..(61): /note="Nucleotide may be methylated to form 5-methylcytosine"
gagaagctgatgttttggtgtattgtcagccatcgtcctgggactcggagactatggcctcgcctccccaccctcctcttggaattacaagccctggggtttgaagctgactttatagctgc

SEQ ID NO: 20643 - DNA, 122 bp, Homo sapiens
  misc_feature (61)..(62): /note="This region represents a CpG dinucleotide"
  misc_feature (61)..(61): /note="Nucleotide may be methylated to form 5-methylcytosine"
tttcaacaaaaaattgcgaggcatgctgaaaagtaaaaaactaaacaaaacaaaaacacacgcatgcaatctgaaaagacaaagcaagcatcagcaccagacacagatatggcagggatgtt

SEQ ID NO: 20644 - DNA, 122 bp, Homo sapiens
  misc_feature (61)..(62): /note="This region represents a CpG dinucleotide"
  misc_feature (61)..(61): /note="Nucleotide may be methylated to form 5-methylcytosine"
atccagcccctttctgggccatgactatggtgttgactcaaccaaagcctcagttgagttcgtctgagctcaacagggttcacaaatgattggaatcattttctttagcataagtgggtagg

SEQ ID NO: 20645 - DNA, 122 bp, Homo sapiens
  misc_feature (61)..(62): /note="This region represents a CpG dinucleotide"
  misc_feature (61)..(61): /note="Nucleotide may be methylated to form 5-methylcytosine"
aaataggaggaaaataagcagagacacaaaaatgactcaagtgttgaaaaatatgatccacgcaactaaaaatacattgcaactgagtttgaagaggaaaagactgggtgtcaacattccag

SEQ ID NO: 20646 - DNA, 122 bp, Homo sapiens
  misc_feature (61)..(62): /note="This region represents a CpG dinucleotide"
  misc_feature (61)..(61): /note="Nucleotide may be methylated to form 5-methylcytosine"
tctggtagctacggtgacttgtgttgaactcactgttccctgcattgttctgagtgcccacgtaataatccagttaatcctcacgattctttgaggtgctgtcacccccattttgtgtatga

SEQ ID NO: 20647 - DNA, 122 bp, Homo sapiens
  misc_feature (61)..(62): /note="This region represents a CpG dinucleotide"
  misc_feature (61)..(61): /note="Nucleotide may be methylated to form 5-methylcytosine"
acacagtgggtacacaataaaatgttagcttccttctttcagaactgaatttccaactgccggatagatctcgcactaatctttgagttcacaagacccattagcccaccccattgctggaa

SEQ ID NO: 20648 - DNA, 122 bp, Homo sapiens
  misc_feature (61)..(62): /note="This region represents a CpG dinucleotide"
  misc_feature (61)..(61): /note="Nucleotide may be methylated to form 5-methylcytosine"
tatgggcaaaaatgtgatttcttcatctgggctttaagagctataaataaaacacatggccgggtgcatgcctatagtcctagctatttgggaagctaaggcagtaggattccttgacccca

SEQ ID NO: 20649 - DNA, 122 bp, Homo sapiens
  misc_feature (61)..(62): /note="This region represents a CpG dinucleotide"
  misc_feature (61)..(61): /note="Nucleotide may be methylated to form 5-methylcytosine"
acgcccgccactcttctgctgaacattcattcacacgtgcctcaggaaaatcttcggacacgcacatcaagccatctggcatgggagtgtttaattttgagagtgatcttttgtttattgag

SEQ ID NO: 20650 - DNA, 122 bp, Homo sapiens
  misc_feature (61)..(62): /note="This region represents a CpG dinucleotide"
  misc_feature (61)..(61): /note="Nucleotide may be methylated to form 5-methylcytosine"
tgtgagcaaatcaacaaggtttgacgcatgagaggcaaaggtatctgactcactagagaacggagcagagagaagcaaagcagaagggattttctactgtaattacccaagatcaccagggc

SEQ ID NO: 20651 - DNA, 122 bp, Homo sapiens
  misc_feature (61)..(62): /note="This region represents a CpG dinucleotide"
  misc_feature (61)..(61): /note="Nucleotide may be methylated to form 5-methylcytosine"
aaatgatttgtccacagccacattccaataggtggctaagcacaaactcaggttgtttgacgctagaacttaatgctacttgtgaccagtcaatcgccatgctacctcatacagaccctcac

SEQ ID NO: 20652 - DNA, 122 bp, Homo sapiens
  misc_feature (61)..(62): /note="This region represents a CpG dinucleotide"
  misc_feature (61)..(61): /note="Nucleotide may be methylated to form 5-methylcytosine"
ctctaactaaacacatgagtgagcatttggtcatctcaggccaggcaggaatattggaaacggatggagcaaagtcacagacaaagcctgcatgcctgcatgccatgtttttaggttgtaag

SEQ ID NO: 20653 - DNA, 122 bp, Homo sapiens
  misc_feature (61)..(62): /note="This region represents a CpG dinucleotide"
  misc_feature (61)..(61): /note="Nucleotide may be methylated to form 5-methylcytosine"
gatgctcattagggctcaggcacagattactatcacaatgtacttatctcaacatgctatcgtcagaccacacagtcaaatcaaattttgaaggctcaaaggatgtgtactgaagaacatcc

SEQ ID NO: 20654 - DNA, 122 bp, Homo sapiens
  misc_feature (61)..(62): /note="This region represents a CpG dinucleotide"
  misc_feature (61)..(61): /note="Nucleotide may be methylated to form 5-methylcytosine"
agactcattagagagtgggacatggcctctgtgtgtccttacagtgcagagtttccaagccgaggagctggtggaatgaccgggggtgtgggggtgtaggaggtgcactgaggcggcattat

SEQ ID NO: 20655 - DNA, 122 bp, Homo sapiens
  misc_feature (61)..(62): /note="This region represents a CpG dinucleotide"
  misc_feature (61)..(61): /note="Nucleotide may be methylated to form 5-methylcytosine"
cttgccggggagcacaaaggtctaaacagatgatacgatatactgttatactgctgatggcgatgacttctagatttttattactaatcagaggacatgtgtttgtgtgtctgtgtaagtga

SEQ ID NO: 20656 - DNA, 122 bp, Homo sapiens
  misc_feature (61)..(62): /note="This region represents a CpG dinucleotide"
  misc_feature (61)..(61): /note="Nucleotide may be methylated to form 5-methylcytosine"
tcagaatggctttggaaatccctgcctccacctcccggagattctgattcagtacaccaacggtaggtcaggagaatctgtttctaacaagcttcaaagtgatgcagacactactgctttgt

SEQ ID NO: 20657 - DNA, 122 bp, Homo sapiens
  misc_feature (61)..(62): /note="This region represents a CpG dinucleotide"
  misc_feature (61)..(61): /note="Nucleotide may be methylated to form 5-methylcytosine"
aacagaaggggagggcctcagtagctcccacttcttttccagcccacatttggaagcaaccggcacccacgcaggttctggaacttgccaaggtcagtgtcttttccacctccagaattatc

SEQ ID NO: 20658 - DNA, 122 bp, Homo sapiens
  misc_feature (61)..(62): /note="This region represents a CpG dinucleotide"
  misc_feature (61)..(61): /note="Nucleotide may be methylated to form 5-methylcytosine"
agagggatgagctcatctctggatcccaagagacagccccaccccaaccttctaggagaccggaatcaagttcttgactcatctgaattcatatgcttcaatggaacctgcagtcgagtagc

SEQ ID NO: 20659 - DNA, 122 bp, Homo sapiens
  misc_feature (61)..(62): /note="This region represents a CpG dinucleotide"
  misc_feature (61)..(61): /note="Nucleotide may be methylated to form 5-methylcytosine"
ccggagtccacctcaccgacttacctgatttctctaggactggttctgtgattgcagaaccgtgggttcctcagactgcgtctgtctgtccttcaccaggccagggccgctgaggagcatgc

SEQ ID NO: 20660 - DNA, 122 bp, Homo sapiens
  misc_feature (61)..(62): /note="This region represents a CpG dinucleotide"
  misc_feature (61)..(61): /note="Nucleotide may be methylated to form 5-methylcytosine"
tatagataaaatcatgttctatatcacccctttggataaaccttttatttatgaatctagcgcatttcccctcgtaggctaaatttccttaagcttttctggacaaattccctgcattcaac

SEQ ID NO: 20661 - DNA, 122 bp, Homo sapiens
  misc_feature (61)..(62): /note="This region represents a CpG dinucleotide"
  misc_feature (61)..(61): /note="Nucleotide may be methylated to form 5-methylcytosine"
gcccactgaatcatctctaggggtgaggtcagtatcttatttttaagcagctttgaaaagcgacaggctggttctaataaaccagcttcttcaatctgcaggattttgatagaaaactccct

SEQ ID NO: 20662 - DNA, 122 bp, Homo sapiens
  misc_feature (61)..(62): /note="This region represents a CpG dinucleotide"
  misc_feature (61)..(61): /note="Nucleotide may be methylated to form 5-methylcytosine"
aagctttttaccttaagcctttgttttgatctcattttctcttctctgagaataaagtaacgctcaaagtagtattggcaaaacagagtgctgaactgattgtcagtaccctgttttcccag

SEQ ID NO: 20663 - DNA, 122 bp, Homo sapiens
  misc_feature (61)..(62): /note="This region represents a CpG dinucleotide"
  misc_feature (61)..(61): /note="Nucleotide may be methylated to form 5-methylcytosine"
cagacggtgctcagtggctctgtctgccagtgacacatttcaagagggcggatcccacagcgaactcaggtggctggtggctcatgagaaatgtgccactccagtcctttgccaggttcttg

SEQ ID NO: 20664 - DNA, 122 bp, Homo sapiens
  misc_feature (61)..(62): /note="This region represents a CpG dinucleotide"
  misc_feature (61)..(61): /note="Nucleotide may be methylated to form 5-methylcytosine"
tcttgtggtgtctgagttgcccagaacagtacagctgtagtcagtccgcatctgtgacttcgttcactgtgattctgcatccaagttcaagcatctgatgacataattacacggtctacctt

SEQ ID NO: 20665 - DNA, 122 bp, Homo sapiens
  misc_feature (61)..(62): /note="This region represents a CpG dinucleotide"
  misc_feature (61)..(61): /note="Nucleotide may be methylated to form 5-methylcytosine"
gctacaaccaagccttcctgtgtgttctcacctgccccagctgggtgaggtctcaggccacgctcttccttgggcccctgggatggtgcctagttgcataactatttgaatggctctgcagg

SEQ ID NO: 20666 - DNA, 122 bp, Homo sapiens
  misc_feature (61)..(62): /note="This region represents a CpG dinucleotide"
  misc_feature (61)..(61): /note="Nucleotide may be methylated to form 5-methylcytosine"
aacctatgtttagctccaggataaggaagccttggaaacaggattgtgtgagtaagagcccggagttaggattcaagtaaactgagcattaatcccacatgtgtcactgtcttgctgtgtga

SEQ ID NO: 20667 - DNA, 122 bp, Homo sapiens
  misc_feature (61)..(62): /note="This region represents a CpG dinucleotide"
  misc_feature (61)..(61): /note="Nucleotide may be methylated to form 5-methylcytosine"
ttcattgctctccagcacatgctaagaatttagcttccaccgccttaagtaaacactctgcgataccagtcctaaaaaagtcactgtggcaggggctgtggtgcttgtgaacattccatctg

SEQ ID NO: 20668 - DNA, 122 bp, Homo sapiens
  misc_feature (61)..(62): /note="This region represents a CpG dinucleotide"
  misc_feature (61)..(61): /note="Nucleotide may be methylated to form 5-methylcytosine"
atcccaatgagtcaggagttattcatttattttctgctttgatgacaatatccattgatacggttataatccaagttggtgttttaaggcgcaatttttactcagctgtactccgtttcctt

SEQ ID NO: 20669 - DNA, 122 bp, Homo sapiens
  misc_feature (61)..(62): /note="This region represents a CpG dinucleotide"
  misc_feature (61)..(61): /note="Nucleotide may be methylated to form 5-methylcytosine"
acaattgattgcaaggaacagcaactacctcaggctaacttacaactaaaattggattcacgttaaggatgctggaatatctccaggaactcagctgcaagatgttcatagaaatcctagag

SEQ ID NO: 20670 - DNA, 122 bp, Homo sapiens
  misc_feature (61)..(62): /note="This region represents a CpG dinucleotide"
  misc_feature (61)..(61): /note="Nucleotide may be methylated to form 5-methylcytosine"
gttcccaccctcagcctagagtcaaggccagactagatcagcctaagcccagccacgccacgggtgcagcagtgaagagcaaatgccaactgtccatgacagtgactttcaaaggggcgtgt

SEQ ID NO: 20671 - DNA, 122 bp, Homo sapiens
  misc_feature (61)..(62): /note="This region represents a CpG dinucleotide"
  misc_feature (61)..(61): /note="Nucleotide may be methylated to form 5-methylcytosine"
cttacagtcacgggtcaataggatactgcagctaggatagcagtccacacagggccagggcggggcactaaggagatgacagtcatttctcctagagagtcatagatgaagtcatatgtcag

SEQ ID NO: 20672 - DNA, 122 bp, Homo sapiens
  misc_feature (61)..(62): /note="This region represents a CpG dinucleotide"
  misc_feature (61)..(61): /note="Nucleotide may be methylated to form 5-methylcytosine"
taactctgtggtttgcagatgcctttaaggttccaatcataagactggtttgtatattagcgtctaggctctcagcagggacactggtaatcaagcttgtgttcccagtcagaaatccaaag

SEQ ID NO: 20673 - DNA, 122 bp, Homo sapiens
  misc_feature (61)..(62): /note="This region represents a CpG dinucleotide"
  misc_feature (61)..(61): /note="Nucleotide may be methylated to form 5-methylcytosine"
ggttagagggagagtttccttgtcactaagttttctcatagctctcacccagtgcagtggcgcgatcgcagctcactacagcctccatctcctgggctcaagccaccctctcagcttggaat

SEQ ID NO: 20674 - DNA, 122 bp, Homo sapiens
  misc_feature (61)..(62): /note="This region represents a CpG dinucleotide"
  misc_feature (61)..(61): /note="Nucleotide may be methylated to form 5-methylcytosine"
tttttggttgatacctgctttgatcaagatataacgggctgaagaacagcagcgaggctgcgtgctgagctgtctacacctgcaaatctcatcaactcctatcagctgggcagcaggttgcc

SEQ ID NO: 20675 - DNA, 122 bp, Homo sapiens
  misc_feature (61)..(62): /note="This region represents a CpG dinucleotide"
  misc_feature (61)..(61): /note="Nucleotide may be methylated to form 5-methylcytosine"
ctgtctcattaggctgcagccacctgcaggtttgactggggctggtgggtctgctcccaacgtgacttgctcactgctggtgttggcagaaggctgtggctcctcattgtggggactctcca

SEQ ID NO: 20676 - DNA, 122 bp, Homo sapiens
  misc_feature (61)..(62): /note="This region represents a CpG dinucleotide"
  misc_feature (61)..(61): /note="Nucleotide may be methylated to form 5-methylcytosine"
gaggtagaggaaatgaaggagtcaaagcttccaggtgataaaggacttgtgttgatgtctcgggccaagcatcatgccatctctgctaaactgaacaagcccttcctgtttgacaccaagcc

SEQ ID NO: 20677 - DNA, 122 bp, Homo sapiens
  misc_feature (61)..(62): /note="This region represents a CpG dinucleotide"
  misc_feature (61)..(61): /note="Nucleotide may be methylated to form 5-methylcytosine"
cagcctggagattggcctgcgacccgccggtgaggagcacagggggcctgagggcggggtcggggctgtggggccagaggacggtggcgtctccactcagcaccagcagccttggcaggcag

SEQ ID NO: 20678 - DNA, 122 bp, Homo sapiens
  misc_feature (61)..(62): /note="This region represents a CpG dinucleotide"
  misc_feature (61)..(61): /note="Nucleotide may be methylated to form 5-methylcytosine"
tgggtagatatttttaaaatgctttctgtagaagccgcaccagtgtaccttccttcctgtcggcaatgtgtgacagtaccagtttcctttccccaccccatcagctgagtgtgttatcaaac

SEQ ID NO: 20679 - DNA, 122 bp, Homo sapiens
  misc_feature (61)..(62): /note="This region represents a CpG dinucleotide"
  misc_feature (61)..(61): /note="Nucleotide may be methylated to form 5-methylcytosine"
tcaggagatctatctcacatgcaaaaacacacataggctcaaaataaagggaaatgaaagcgaatgaaagcaaaaaagggaagtgaaagcataccaagtaaatgaaagcaaaataaagcagg

SEQ ID NO: 20680 - DNA, 122 bp, Homo sapiens
  misc_feature (61)..(62): /note="This region represents a CpG dinucleotide"
  misc_feature (61)..(61): /note="Nucleotide may be methylated to form 5-methylcytosine"
aggttggctgtggttcagctgtgtcactaggctgaacttactcaataagccacataacttcgagtcaggttccagtccattgtatgtgttattttcaaaatctaggctaaaggaggaacagt

SEQ ID NO: 20681 - DNA, 122 bp, Homo sapiens
  misc_feature (61)..(62): /note="This region represents a CpG dinucleotide"
  misc_feature (61)..(61): /note="Nucleotide may be methylated to form 5-methylcytosine"
tgctgggtaataccttaggatgtgagagccgcttgcctttaaatatggaaccagctgctacgtgctcttgaccacggcaaagctggcaggacctcagatttccttatgcgcaaaatgtcccc

SEQ ID NO: 20682 - DNA, 122 bp, Homo sapiens
  misc_feature (61)..(62): /note="This region represents a CpG dinucleotide"
  misc_feature (61)..(61): /note="Nucleotide may be methylated to form 5-methylcytosine"
ttcacgtatgggaaaattgagattcagagaagttaagtttcccagggacaccgcagatcacgaacagagctgggattcagtccaacttcagagctaatgcactttggaggaagagatacaat

SEQ ID NO: 20683 - DNA, 122 bp, Homo sapiens
  misc_feature (61)..(62): /note="This region represents a CpG dinucleotide"
  misc_feature (61)..(61): /note="Nucleotide may be methylated to form 5-methylcytosine"
ttaactagtctcagtgatctcacccacaaagtgtgcataataacatctgcctcactgggccgtcatagagaccagcgagctaatcaggtaaagaagtcagcaggggctagaacagaatgggt

SEQ ID NO: 20684 - DNA, 122 bp, Homo sapiens
  misc_feature (61)..(62): /note="This region represents a CpG dinucleotide"
  misc_feature (61)..(61): /note="Nucleotide may be methylated to form 5-methylcytosine"
gacttcaggtaatctgcccaccttggcctcccaatgtgctgggattacaggcattagccacggtgccgggccgtgcttctgctgttatctacagtgatctccaagttctgaagaacccttct

SEQ ID NO: 20685 - DNA, 122 bp, Homo sapiens
  misc_feature (61)..(62): /note="This region represents a CpG dinucleotide"
  misc_feature (61)..(61): /note="Nucleotide may be methylated to form 5-methylcytosine"
gggccaccagcacaattaacatgttcaagcactattactaaccctaaggattaacttggccgggtcagtggctcacacctataatcccagcagtttaggaggctaaggtgggaggattgctt

SEQ ID NO: 20686 - DNA, 122 bp, Homo sapiens
  misc_feature (61)..(62): /note="This region represents a CpG dinucleotide"
  misc_feature (61)..(61): /note="Nucleotide may be methylated to form 5-methylcytosine"
ttaactcaccagtacaatagtagtaatactcattgtaagttgctgaattttgcaacttaacgaatgacaagaacatggcataggtcagtgatgcatgttatgcttaattttgagtgagtgac

SEQ ID NO: 20687 - DNA, 122 bp, Homo sapiens
  misc_feature (61)..(62): /note="This region represents a CpG dinucleotide"
  misc_feature (61)..(61): /note="Nucleotide may be methylated to form 5-methylcytosine"
ttacattatctgtatgtatcacaagcaaccatatttcctcaattggcaaatcaggttggccgtttcctggtaaattaaagcccatttggaatttgaatagatcttattttgaacaagccttt

SEQ ID NO: 20688 - DNA, 122 bp, Homo sapiens
  misc_feature (61)..(62): /note="This region represents a CpG dinucleotide"
  misc_feature (61)..(61): /note="Nucleotide may be methylated to form 5-methylcytosine"
gagaaaatgtaaacaaaactcttaacatagcgcctgtcacattaataaatgctcagtaaacgtaagttccctgagggatccaggcacctcacaggcacccaacaacacttgatgaaataatg

SEQ ID NO: 20689 - DNA, 122 bp, Homo sapiens
  misc_feature (61)..(62): /note="This region represents a CpG dinucleotide"
  misc_feature (61)..(61): /note="Nucleotide may be methylated to form 5-methylcytosine"
gcagttcctgtggtttgttcccagtagaaatcacagatattttcatatcccattaccagtcgctgcaaatatcttgaaatattatttacccttatcactacttcaaagttatggtggttatt

SEQ ID NO: 20690 - DNA, 122 bp, Homo sapiens
  misc_feature (61)..(62): /note="This region represents a CpG dinucleotide"
  misc_feature (61)..(61): /note="Nucleotide may be methylated to form 5-methylcytosine"
tctgtgggtgtggagggaggggactgagcaaagcctcagggaggccacatacgttctcagcgccatgcttggctggtgactggtcatgcaccattggcagggcctggagcacgtgcaaggaa

SEQ ID NO: 20691 - DNA, 122 bp, Homo sapiens
  misc_feature (61)..(62): /note="This region represents a CpG dinucleotide"
  misc_feature (61)..(61): /note="Nucleotide may be methylated to form 5-methylcytosine"
caacagcgtgcacattcttccccagggcaccacttccgcctccctcatccccactgctcccgatccctgtccacagacccacttcccgccctggtgtgatcctcgtggccactgtggcccct

SEQ ID NO: 20692 - DNA, 122 bp, Homo sapiens
  misc_feature (61)..(62): /note="This region represents a CpG dinucleotide"
  misc_feature (61)..(61): /note="Nucleotide may be methylated to form 5-methylcytosine"
ctcatgtctcccatgcccagactttaacttttccagaaagcttcagaatggggctgactccgtctgctgctcttccctgtctcttgggatctcccttaatagaggaccctggggctcagtcc

SEQ ID NO: 20693 - DNA, 122 bp, Homo sapiens
  misc_feature (61)..(62): /note="This region represents a CpG dinucleotide"
  misc_feature (61)..(61): /note="Nucleotide may be methylated to form 5-methylcytosine"
tacacaagtcacctcgagtgataagatcagtacaggttctgctaagcagaccagcagctgcgtttgaagctcacggacagtctagcaagccacagaaatcttttgcacatgcattccagaag

SEQ ID NO: 20694 - DNA, 122 bp, Homo sapiens
  misc_feature (61)..(62): /note="This region represents a CpG dinucleotide"
  misc_feature (61)..(61): /note="Nucleotide may be methylated to form 5-methylcytosine"
atgttcccgcccacaatacctgccagagaactacatcacaagtgtcctttttccttatatcgtggaaatgcaactgtgatgcccattagaactgacagggaaactctggtcttcccttttta

SEQ ID NO: 20695 - DNA, 122 bp, Homo sapiens
  misc_feature (61)..(62): /note="This region represents a CpG dinucleotide"
  misc_feature (61)..(61): /note="Nucleotide may be methylated to form 5-methylcytosine"
tgagggagaggaagagttcaaggatgaccagattttccagtctggcaaccgaatccataacggtcacatctactgaatggggagtaacaaaaaaaagagtcaagtttgggatgtgggtaaga

SEQ ID NO: 20696 - DNA, 122 bp, Homo sapiens
  misc_feature (61)..(62): /note="This region represents a CpG dinucleotide"
  misc_feature (61)..(61): /note="Nucleotide may be methylated to form 5-methylcytosine"
gcccacactgaccagtcatcggaagtgggctatccctggggacacgcgaaccttagcctacggcagtacccagggagtgactcagccatgagccatcagcaggcaacacccgcaaccactga

SEQ ID NO: 20697 - DNA, 122 bp, Homo sapiens
  misc_feature (61)..(62): /note="This region represents a CpG dinucleotide"
  misc_feature (61)..(61): /note="Nucleotide may be methylated to form 5-methylcytosine"
tctggaagaagaaataataggatttggtatctaggggatggagcctgagggaagggttaacgatgacttaaaggaattgagcatgagcagttaggagaatggtattaccattaactgaggtt

SEQ ID NO: 20698 - DNA, 122 bp, Homo sapiens
  misc_feature (61)..(62): /note="This region represents a CpG dinucleotide"
  misc_feature (61)..(61): /note="Nucleotide may be methylated to form 5-methylcytosine"
gaaggggctctgagcacttctcactctcaccactcttattcggtgtcactcttataccagcggcacaatgaggccactgtaatgaggcaagacaaaggtatacaaggcataaatactggaaa

SEQ ID NO: 20699 - DNA, 122 bp, Homo sapiens
  misc_feature (61)..(62): /note="This region represents a CpG dinucleotide"
  misc_feature (61)..(61): /note="Nucleotide may be methylated to form 5-methylcytosine"
acattgattgagtattttctaaatgtcatggcttgtgctaagccgtggctgcatcacccacgtaactctccttacaaccacgcctcatgaggctgttaagaataaggttagactgcctgagt

SEQ ID NO: 20700 - DNA, 122 bp, Homo sapiens
  misc_feature (61)..(62): /note="This region represents a CpG dinucleotide"
  misc_feature (61)..(61): /note="Nucleotide may be methylated to form 5-methylcytosine"
cattatccgtcttttacacatgaggaaattgagggctggagggttcaaataacttcctaacggttacacagctgtggaatcaagattcagactcacaaagctgatgccagagtccattcttc

SEQ ID NO: 20701 - DNA, 122 bp, Homo sapiens
  misc_feature (61)..(62): /note="This region represents a CpG dinucleotide"
  misc_feature (61)..(61): /note="Nucleotide may be methylated to form 5-methylcytosine"
cctgttctaggggaagcccccatgtagtgagcacactcaggaagcctatggagaagcccacgtagaaaggaaccacggcctcccgcccagagccatgtgaagtgaatcctccagccctagtc

SEQ ID NO: 20702 - DNA, 122 bp, Homo sapiens
  misc_feature (61)..(62): /note="This region represents a CpG dinucleotide"
  misc_feature (61)..(61): /note="Nucleotide may be methylated to form 5-methylcytosine"
cttcacttcttggtgactaatactagttgacaaaacagcatattctaaactgattgtcttcgttatccagtagctttcctattctccataacaaatgttccaaatctttgattactcacctc

SEQ ID NO: 20703 - DNA, 122 bp, Homo sapiens
  misc_feature (61)..(62): /note="This region represents a CpG dinucleotide"
  misc_feature (61)..(61): /note="Nucleotide may be methylated to form 5-methylcytosine"
ccacagagtcagatcacggcttcacaccagtcgttctggtcacttaggcgttcgcgtgagcgctcaaccccttaccgccacctcatcgtcactctacaccattctgagcgcaaaaatgtttt

SEQ ID NO: 20704 - DNA, 122 bp, Homo sapiens
  misc_feature (61)..(62): /note="This region represents a CpG dinucleotide"
  misc_feature (61)..(61): /note="Nucleotide may be methylated to form 5-methylcytosine"
ggagtggttgtggagggcagagagaatagcacatgaacttctaatgacttttcctcatcacgtgattcaatatttcaaggtaggataaggatgtgtgtaatgagagtacataaagtataaaa

SEQ ID NO: 20705 - DNA, 122 bp, Homo sapiens
  misc_feature (61)..(62): /note="This region represents a CpG dinucleotide"
  misc_feature (61)..(61): /note="Nucleotide may be methylated to form 5-methylcytosine"
gtcagggcgccggagtagccgcggtaccctgagcggtaggagcggggctgggagtagtagcgggagaagggggtgtagaaggtggcaggcagtacgttggggaccacgtgcggcttcccgct

SEQ ID NO: 20706 - DNA, 122 bp, Homo sapiens
  misc_feature (61)..(62): /note="This region represents a CpG dinucleotide"
  misc_feature (61)..(61): /note="Nucleotide may be methylated to form 5-methylcytosine"
agaagtatctaaataatttatttctaaaagtatattctataattgcctaatattcaaaagcgactgctagacattgcaagaattgttttttaaaagacacttcctgttcacacttcattagg

SEQ ID NO: 20707 - DNA, 122 bp, Homo sapiens
  misc_feature (61)..(62): /note="This region represents a CpG dinucleotide"
  misc_feature (61)..(61): /note="Nucleotide may be methylated to form 5-methylcytosine"
gaggcatccagctccatgggccttttcttcccatccatctttgtaagttgacgatgtcagcgtcctaaatagaaacgctctttatgtgaggaagccggatgctgatgggccgaatctgttcc

SEQ ID NO: 20708 - DNA, 122 bp, Homo sapiens
  misc_feature (61)..(62): /note="This region represents a CpG dinucleotide"
  misc_feature (61)..(61): /note="Nucleotide may be methylated to form 5-methylcytosine"
ttttctgttttactacattgtgatttgctaattcatgtgtcaggccctttcccttggactcgctttttagtggttaatgagctgagtttctttgcatttaaaaaatggatcctatttcataa

SEQ ID NO: 20709 - DNA, 122 bp, Homo sapiens
  misc_feature (61)..(62): /note="This region represents a CpG dinucleotide"
  misc_feature (61)..(61): /note="Nucleotide may be methylated to form 5-methylcytosine"
cagacatctacagaacacatctgttgagctgtgtagccttcaggctgggccatggttcctcgactttccaggtctgacttatctatacctccctgagttatggaggtcaatttcaggattgt

SEQ ID NO: 20710 - DNA, 122 bp, Homo sapiens
  misc_feature (61)..(62): /note="This region represents a CpG dinucleotide"
  misc_feature (61)..(61): /note="Nucleotide may be methylated to form 5-methylcytosine"
tcagccagtgtctgcagggtttcaggatttggggtaggaaacagaagatctcacacatgtcgtgctgattttaaataaggcatctgtctctgagacacctgggagagcacagccaccttcct

SEQ ID NO: 20711 - DNA, 122 bp, Homo sapiens
  misc_feature (61)..(62): /note="This region represents a CpG dinucleotide"
  misc_feature (61)..(61): /note="Nucleotide may be methylated to form 5-methylcytosine"
ctccacattttgctccccttacattaacttccagggcccctgggaccaggggctctgtgccggcagccaggtgtgcaccttatatctgtgtacccccagccatattcaggcaaggtagggga

SEQ ID NO: 20712 - DNA, 122 bp, Homo sapiens
  misc_feature (61)..(62): /note="This region represents a CpG dinucleotide"
  misc_feature (61)..(61): /note="Nucleotide may be methylated to form 5-methylcytosine"
aaacattgataggattaaataacagtgcagagctctacttccgggcatcacagaacatagcggggaagaggtcatagagttcagtgtttctccaagtgttatgtcacctgttgggaattgca

SEQ ID NO: 20713 - DNA, 122 bp, Homo sapiens
  misc_feature (61)..(62): /note="This region represents a CpG dinucleotide"
  misc_feature (61)..(61): /note="Nucleotide may be methylated to form 5-methylcytosine"
caggtctcttcctgcttgaccagcactctgcttatgctggcacaggagctgccctgaatacgttcagagtgactgtgggcattctttcctctggggtgcatgtctaaggtcatactcgcatt

SEQ ID NO: 20714 - DNA, 122 bp, Homo sapiens
  misc_feature (61)..(62): /note="This region represents a CpG dinucleotide"
  misc_feature (61)..(61): /note="Nucleotide may be methylated to form 5-methylcytosine"
ctgctgcttcctgcctgtgtaacagcagaggctggagcctctgtttgcttatctataaaacgaggataatgaggcctatctcataaagctgttttgaagattgagataatgtgcagtgcctg

SEQ ID NO: 20715 - DNA, 122 bp, Homo sapiens
  misc_feature (61)..(62): /note="This region represents a CpG dinucleotide"
  misc_feature (61)..(61): /note="Nucleotide may be methylated to form 5-methylcytosine"
agacattatgtcattcttctgattgtgaatttaattaacatcctgattcctggatggtatcgtgggcctattgaatgagaatctctggagctagaactggaaatctgcattttaacaaataa

SEQ ID NO: 20716 - DNA, 122 bp, Homo sapiens
  misc_feature (61)..(62): /note="This region represents a CpG dinucleotide"
  misc_feature (61)..(61): /note="Nucleotide may be methylated to form 5-methylcytosine"
gttataggtcccatgtgttgggtcttcctgcgaggccttcacaaagatgattttgtcattcgctgaaagcgtgaagtgaatcaacggcctcctcttgctccgcagcactttattcacactgt

SEQ ID NO: 20717 - DNA, 122 bp, Homo sapiens
  misc_feature (61)..(62): /note="This region represents a CpG dinucleotide"
  misc_feature (61)..(61): /note="Nucleotide may be methylated to form 5-methylcytosine"
gacccacaatgggagcaggctgcatcttttgcctactcaggataaaacgtgacactgctgcgtcatacagagatagttctgcatggtttcctaagaaaggcaaagccagaatgcccggggac

SEQ ID NO: 20718 - DNA, 122 bp, Homo sapiens
  misc_feature (61)..(62): /note="This region represents a CpG dinucleotide"
  misc_feature (61)..(61): /note="Nucleotide may be methylated to form 5-methylcytosine"
taaaaaaaaaaaaaaatttaaaaaaaagacagggcctccctgacttgcccagactggacgcgaatcccagtgcactggatgcttttcacgaaggacagcagatcagttctaagatccaccaa

SEQ ID NO: 20719 - DNA, 122 bp, Homo sapiens
  misc_feature (61)..(62): /note="This region represents a CpG dinucleotide"
  misc_feature (61)..(61): /note="Nucleotide may be methylated to form 5-methylcytosine"
ttgggacaatagatggggcatctggaaaaaatattaaaaaaaaaaatgtatgggcagagacgatgcctcaggaccttaaatgtgctgtcatacagtgttcagtgatgttgctgttaaatgca

SEQ ID NO: 20720 - DNA, 122 bp, Homo sapiens
  misc_feature (61)..(62): /note="This region represents a CpG dinucleotide"
  misc_feature (61)..(61): /note="Nucleotide may be methylated to form 5-methylcytosine"
ccaccccccaaaatcaaccggacaaacaaacctcacagcgaatgcggggtgccacagaagcgacttggggagggctgaggaggactggttttatttctttttcttactttctttgtttagtt

SEQ ID NO: 20721 - DNA, 122 bp, Homo sapiens
  misc_feature (61)..(62): /note="This region represents a CpG dinucleotide"
  misc_feature (61)..(61): /note="Nucleotide may be methylated to form 5-methylcytosine"
acctcaagtctccaggcagccccatgaggtaagcaagtttccttcatgtccctgttttgccgatgaggaagtagtaagagtaaatagactagggaaccacaacctgatcacctctcttctgg

SEQ ID NO: 20722 - DNA, 122 bp, Homo sapiens
  misc_feature (61)..(62): /note="This region represents a CpG dinucleotide"
  misc_feature (61)..(61): /note="Nucleotide may be methylated to form 5-methylcytosine"
tcatggtggcttgcatggcatcattgaaagtcattgtgagcctcatctgctcaggcacagcgggtggcagtagggaatttagcaacagatgaggacaaaaacttcctggggctgaatagcgg

SEQ ID NO: 20723 - DNA, 122 bp, Homo sapiens
  misc_feature (61)..(62): /note="This region represents a CpG dinucleotide"
  misc_feature (61)..(61): /note="Nucleotide may be methylated to form 5-methylcytosine"
gaaacatcttcggatgcccaggcagctggaggtgtcacaccaggctcaccatttgcaagacgcctcaggattttgctcagacaccctcaggagacactccaggaggaagtctgccagctgcc

SEQ ID NO: 20724 - DNA, 122 bp, Homo sapiens
  misc_feature (61)..(62): /note="This region represents a CpG dinucleotide"
  misc_feature (61)..(61): /note="Nucleotide may be methylated to form 5-methylcytosine"
attcagcaaaacccagttccaggaatggtagtcacacacctttcctgctggatcttattccgtcaggtccaatccagccagttgtagatgatgattcatttttaccttttcctgtcagtctc

SEQ ID NO: 20725 - DNA, 122 bp, Homo sapiens
  misc_feature (61)..(62): /note="This region represents a CpG dinucleotide"
  misc_feature (61)..(61): /note="Nucleotide may be methylated to form 5-methylcytosine"
aagaggaaatcagatggagaggaccgttaggagtgttggttgggttggaggcacatattacgcatttgaactagtgtttgactgagtttttgaggtggttctaaatgacttccaggtggcct

SEQ ID NO: 20726 - DNA, 122 bp, Homo sapiens
  misc_feature (61)..(62): /note="This region represents a CpG dinucleotide"
  misc_feature (61)..(61): /note="Nucleotide may be methylated to form 5-methylcytosine"
tgaccttgtgatccgcccaccttgacctcctaaagtgctgggattacaggtgtgagccaccgtgcccagccataagtgctttttttatgctgcctctctgtgtagcacagagataaagacac

SEQ ID NO: 20727 - DNA, 122 bp, Homo sapiens
  misc_feature (61)..(62): /note="This region represents a CpG dinucleotide"
  misc_feature (61)..(61): /note="Nucleotide may be methylated to form 5-methylcytosine"
gaagcaaaagcagaaacccttgataaacccatcagaccttgtgagacttactcactatcacgagaacagcacaggaaagaccagcacaggaaagaccggcccccatgattcaattacctccc

SEQ ID NO: 20728 - DNA, 122 bp, Homo sapiens
  misc_feature (61)..(62): /note="This region represents a CpG dinucleotide"
  misc_feature (61)..(61): /note="Nucleotide may be methylated to form 5-methylcytosine"
caactttaaaagtagtcaagtgtgtttacttaaaaggaaaagctgatcacacctcacatccggttatgaccatcaaagagtcacaggaagttgctgacttattcccagcagaggagagattt

SEQ ID NO: 20729 - DNA, 122 bp, Homo sapiens
  misc_feature (61)..(62): /note="This region represents a CpG dinucleotide"
  misc_feature (61)..(61): /note="Nucleotide may be methylated to form 5-methylcytosine"
tatgaatatcctattcctcaacaacatttcactccatggttttaacattctttcatgaaccgggccgggcacagtggctcacctgtaatcccagcactttgggaggccgaggtgggtggatc

SEQ ID NO: 20730 - DNA, 122 bp, Homo sapiens
  misc_feature (61)..(62): /note="This region represents a CpG dinucleotide"
  misc_feature (61)..(61): /note="Nucleotide may be methylated to form 5-methylcytosine"
aataaggcctccaaactacagtcatgcttacaaacaggtggtaatagttgtcttttaaatcgggatagagggaacagccaacaggatgcaaggaaaaagaaaatcaaacttaaaggctaatg

SEQ ID NO: 20731 - DNA, 122 bp, Homo sapiens
  misc_feature (61)..(62): /note="This region represents a CpG dinucleotide"
  misc_feature (61)..(61): /note="Nucleotide may be methylated to form 5-methylcytosine"
tctgtctgattctaattcccacatatagccatctggccaagctgactttcaacaatctttcgtatctcttctgttttgattattccccaacacacttcatttccaagtcattctaattataa

SEQ ID NO: 20732 - DNA, 122 bp, Homo sapiens
  misc_feature (61)..(62): /note="This region represents a CpG dinucleotide"
  misc_feature (61)..(61): /note="Nucleotide may be methylated to form 5-methylcytosine"
attatgatttcaaccatgagactacatgaaattaagcaacatttaatgtttaatccctagcgaatgacatacttttgctctgggatgtgatttgtttgccgtaattcgttttagtgatattt

SEQ ID NO: 20733 - DNA, 122 bp, Homo sapiens
  misc_feature (61)..(62): /note="This region represents a CpG dinucleotide"
  misc_feature (61)..(61): /note="Nucleotide may be methylated to form 5-methylcytosine"
agtactgatgggcgctactttcacagtaatttgccttcttttcaccttaaccttgctaagcgttatgctaagtgcattgtattttatatctattcttctcaactattctgcaacctgagtgt

SEQ ID NO: 20734 - DNA, 122 bp, Homo sapiens
  misc_feature (61)..(62): /note="This region represents a CpG dinucleotide"
  misc_feature (61)..(61): /note="Nucleotide may be methylated to form 5-methylcytosine"
gggacctgcttgccagtgctctcacatccttattaggggagaccaactctgcagctgtgacgcattgcttcaagaaatgaaactctggaaggtgaccaggagagaacaccctgcctagatta

SEQ ID NO: 20735 - DNA, 122 bp, Homo sapiens
  misc_feature (61)..(62): /note="This region represents a CpG dinucleotide"
  misc_feature (61)..(61): /note="Nucleotide may be methylated to form 5-methylcytosine"
cctttcatgtgatccaagtaaataaagtaagaacttgttgagcatgctcctcaagcatgccgtgatttagtcagccatctgaggtgatacacctacggagtatgctattcctctaacacttt

SEQ ID NO: 20736 - DNA, 122 bp, Homo sapiens
  misc_feature (61)..(62): /note="This region represents a CpG dinucleotide"
  misc_feature (61)..(61): /note="Nucleotide may be methylated to form 5-methylcytosine"
tctctttgatttctaactgcacacacatgctaattgccacggagagtttatttagctggacgtttgggacatgtgggttacatttttatagctacttcagacagaaaatcttttcagtatat

SEQ ID NO: 20737 - DNA, 122 bp, Homo sapiens
  misc_feature (61)..(62): /note="This region represents a CpG dinucleotide"
  misc_feature (61)..(61): /note="Nucleotide may be methylated to form 5-methylcytosine"
aacatctctgggtctgttgttacacatacttacatcactctgaatttgattgacattcctcgtatgctcaagactcatggcgtcaggtaggtatgtgtaatgatgcaatggctgtttgtagt

SEQ ID NO: 20738 - DNA, 122 bp, Homo sapiens
  misc_feature (61)..(62): /note="This region represents a CpG dinucleotide"
  misc_feature (61)..(61): /note="Nucleotide may be methylated to form 5-methylcytosine"
tacggttcccaacattctaccaccaagggctaggagagtcatctccctcccggaaacacacgtcaatgggcttggacgcaatttcaaggctgcatgccaacgtgatcacgtggcattttgat

SEQ ID NO: 20739 - DNA, 122 bp, Homo sapiens
  misc_feature (61)..(62): /note="This region represents a CpG dinucleotide"
  misc_feature (61)..(61): /note="Nucleotide may be methylated to form 5-methylcytosine"
aggcaacatcagtttgtctctgaacaaactgcattcttcacttttactccagtagacagtcgaggtcagcagtttttcagccgtgttgagccctaagaattccctccgaggggtttcagggg

SEQ ID NO: 20740 - DNA, 122 bp, Homo sapiens
  misc_feature (61)..(62): /note="This region represents a CpG dinucleotide"
  misc_feature (61)..(61): /note="Nucleotide may be methylated to form 5-methylcytosine"
taggccagaaagtctttatatcaaattgtcagtctttgcctttgctaggtttgcccaggacgtaaaagacccacctgttcacaaagctaggagcccctgaaaataggtgcacaggccaggag

SEQ ID NO: 20741 - DNA, 122 bp, Homo sapiens
  misc_feature (61)..(62): /note="This region represents a CpG dinucleotide"
  misc_feature (61)..(61): /note="Nucleotide may be methylated to form 5-methylcytosine"
ctatctctccagtgcaccacgtgtcagaatgcacatcctgtgaacattgggaagctacctcgtttccaactttttctcattcccataagaaattttggttattctgtggttcctgtccttct

SEQ ID NO: 20742 - DNA, 122 bp, Homo sapiens
  misc_feature (61)..(62): /note="This region represents a CpG dinucleotide"
  misc_feature (61)..(61): /note="Nucleotide may be methylated to form 5-methylcytosine"
ttttcactggttgaacagacacgtgagttcacacatgacaccatctattgggatgagtcacgttgcttgctcaacaactttaaggcctaggatcagtgacagaactccaggagcagcggggt

SEQ ID NO: 20743 - DNA, 122 bp, Homo sapiens
  misc_feature (61)..(62): /note="This region represents a CpG dinucleotide"
  misc_feature (61)..(61): /note="Nucleotide may be methylated to form 5-methylcytosine"
agttctctctgctgtctgacctgaaccccaactcagaagcagcagaccaacttggtctcccggtatctccagccttccctcaggcctaggcttgctcctcagtctgcaccccaggaccttcc

SEQ ID NO: 20744 - DNA, 122 bp, Homo sapiens
  misc_feature (61)..(62): /note="This region represents a CpG dinucleotide"
  misc_feature (61)..(61): /note="Nucleotide may be methylated to form 5-methylcytosine"
cgggctgaccttgactgttgactccaggaatgtgtgcaaatccttgactcccatgaggaccgcattcccctggtgatcatgcacaaactggttagttgaggcaaaggcatgtgacccaagct

SEQ ID NO: 20745 - DNA, 122 bp, Homo sapiens
  misc_feature (61)..(62): /note="This region represents a CpG dinucleotide"
  misc_feature (61)..(61): /note="Nucleotide may be methylated to form 5-methylcytosine"
tctagtccttcaaacaacactgtagtgtagatcttgttggttctttcagagaaggggaaacggaaactcacagaagcaactagaggagtgagtagaagcccaggtatgctctagacaggcct

SEQ ID NO: 20746 - DNA, 122 bp, Homo sapiens
  misc_feature (61)..(62): /note="This region represents a CpG dinucleotide"
  misc_feature (61)..(61): /note="Nucleotide may be methylated to form 5-methylcytosine"
aggaagtggttcagaagatgtgactggccctgacagcccactttggtttctttttcttcacgacccatccactgggaaactaaaaataagagcattcgagctgtaagcaacgtcccctttct

SEQ ID NO: 20747 - DNA, 122 bp, Homo sapiens
  misc_feature (61)..(62): /note="This region represents a CpG dinucleotide"
  misc_feature (61)..(61): /note="Nucleotide may be methylated to form 5-methylcytosine"
aaatctcttattagtattcccatttccatttctattttttattttcttcttttattcttacgaattccttctttcggcttttcttaggtttaccttgctattttttctgaattatttaattt

SEQ ID NO: 20748 - DNA, 122 bp, Homo sapiens
  misc_feature (61)..(62): /note="This region represents a CpG dinucleotide"
  misc_feature (61)..(61): /note="Nucleotide may be methylated to form 5-methylcytosine"
gtggtggctgtgggccttggccaggaatgggagggccagacacacgctaagacagtgaagcgccaaggccaggcttgcccctggcggaattctcataggcttcttgctttcatagagctaag

SEQ ID NO: 20749 - DNA, 122 bp, Homo sapiens
  misc_feature (61)..(62): /note="This region represents a CpG dinucleotide"
  misc_feature (61)..(61): /note="Nucleotide may be methylated to form 5-methylcytosine"
cagattacctcttctatctacccttccacctcatttttgttagaatgacttggatttaagcgtcattattgtctttctttgaggcagcactgaagaagatgtgtttttttgcttgcaacatt

SEQ ID NO: 20750 - DNA, 122 bp, Homo sapiens
  misc_feature (61)..(62): /note="This region represents a CpG dinucleotide"
  misc_feature (61)..(61): /note="Nucleotide may be methylated to form 5-methylcytosine"
tgcatggcttgggtggggatgactaacttgactcaaattactcatccctgggccagactgcggtagcctggggaccaggtgaaggaatctcaaccttatattgtaaaggcaatggggagcag

SEQ ID NO: 20751 - DNA, 122 bp, Homo sapiens
  misc_feature (61)..(62): /note="This region represents a CpG dinucleotide"
  misc_feature (61)..(61): /note="Nucleotide may be methylated to form 5-methylcytosine"
acaggacacacatcctgccacacccagcactggtgtgagtgacccgtcccatgaagacagcggacgtgatgagagggcaccagtgttttcacacaatgtgcacacactccagtcaaagactt

SEQ ID NO: 20752 - DNA, 122 bp, Homo sapiens
  misc_feature (61)..(62): /note="This region represents a CpG dinucleotide"
  misc_feature (61)..(61): /note="Nucleotide may be methylated to form 5-methylcytosine"
aaatattttaggctttgtgactttgcagcccatatggcctgtgttgcaatgactcagctccgctattgtagtgccagagaaaccatgacggtcccatatgtaaacaaagggtgtatctctgg

SEQ ID NO: 20753 - DNA, 122 bp, Homo sapiens
  misc_feature (61)..(62): /note="This region represents a CpG dinucleotide"
  misc_feature (61)..(61): /note="Nucleotide may be methylated to form 5-methylcytosine"
tactgtaattaaaaaaagaagatatagtttgttctatttaaaacttttctacaattacttcgtgttctgactcagtgatgtaaatataattgtggagatgtgtaaaatatctatggaagagt

SEQ ID NO: 20754 - DNA, 122 bp, Homo sapiens
  misc_feature (61)..(62): /note="This region represents a CpG dinucleotide"
  misc_feature (61)..(61): /note="Nucleotide may be methylated to form 5-methylcytosine"
agagatgctgtcaaactacaggcttagattgagattaggtttcagctgagcataaggaaacgggaatttgttgccgaagggtggaaacctgaggatgtgggactttcctttccagcctcttg

SEQ ID NO: 20755 - DNA, 122 bp, Homo sapiens
  misc_feature (61)..(62): /note="This region represents a CpG dinucleotide"
  misc_feature (61)..(61): /note="Nucleotide may be methylated to form 5-methylcytosine"
gtttccaggcctgtggctgctaagctagcgtccaagtctggctgagaggtgggaggactacggccaggagatgttgggtttcactacatgatgcaatgctctaatttgctgaatcatagttc

SEQ ID NO: 20756 - DNA, 122 bp, Homo sapiens
  misc_feature (61)..(62): /note="This region represents a CpG dinucleotide"
  misc_feature (61)..(61): /note="Nucleotide may be methylated to form 5-methylcytosine"
gatgtccgctttctatctgcagctttaatgtttcacttaatatcctctttggctactgagcgcactcctctcccgcagccggcagcgcttggctgctcgacaacttccttcatttctggcca

SEQ ID NO: 20757 - DNA, 122 bp, Homo sapiens
  misc_feature (61)..(62): /note="This region represents a CpG dinucleotide"
  misc_feature (61)..(61): /note="Nucleotide may be methylated to form 5-methylcytosine"
tgtccttcctgggagaacttttcctgccccagagcagtggtgtttatggaaagaacgtggcgggggaggcgggaggggggaagctggatgggccggactgggagggaggagcctcagctccc

SEQ ID NO: 20758 - DNA, 122 bp, Homo sapiens
  misc_feature (61)..(62): /note="This region represents a CpG dinucleotide"
  misc_feature (61)..(61): /note="Nucleotide may be methylated to form 5-methylcytosine"
ttgataagcactagcatactggggcttgtccactcagaatacttcctcttggaaaccagccgccatgctataaagcagcttgaactacgctatgggatgatgagatgccccatggagacaga

SEQ ID NO: 20759 - DNA, 122 bp, Homo sapiens
  misc_feature (61)..(62): /note="This region represents a CpG dinucleotide"
  misc_feature (61)..(61): /note="Nucleotide may be methylated to form 5-methylcytosine"
cgctgaacacagcccagtttgcaaagagtctagccatgcttgggagctctgaggacaacacggcattgtcacgggcactctcccagctggctgaggtggaagaaaaaattgagcagctccac

SEQ ID NO: 20760 - DNA, 122 bp, Homo sapiens
  misc_feature (61)..(62): /note="This region represents a CpG dinucleotide"
  misc_feature (61)..(61): /note="Nucleotide may be methylated to form 5-methylcytosine"
cagagtgagcctccaaaaacacagacctgatcatgtcactcccaggcctaagatccctaacggcaccccactgtgcatcaaatctggattcctcagcaaggccagcaaggcttaaagcagcc

SEQ ID NO: 20761 - DNA, 122 bp, Homo sapiens
  misc_feature (61)..(62): /note="This region represents a CpG dinucleotide"
  misc_feature (61)..(61): /note="Nucleotide may be methylated to form 5-methylcytosine"
cccaggagttggagagcaacatcacaacaccccatttctactaataatcaaaaaattggccgggcatggtggcatgtgcctgtagtcccagctacttgggaggctgaggcaggagaatcgct

SEQ ID NO: 20762 - DNA, 122 bp, Homo sapiens
  misc_feature (61)..(62): /note="This region represents a CpG dinucleotide"
  misc_feature (61)..(61): /note="Nucleotide may be methylated to form 5-methylcytosine"
ctcaagggatcctccctcctcagcctcccgaaatgctgggattacaggcgtgagccaccgcgcccaggcctgattgttcttttgagccaagaatctgggcctcagcctaggcatcctgtgga

SEQ ID NO: 20763 - DNA, 122 bp, Homo sapiens
  misc_feature (61)..(62): /note="This region represents a CpG dinucleotide"
  misc_feature (61)..(61): /note="Nucleotide may be methylated to form 5-methylcytosine"
gtgacatcatgtaactactaagagtaggtcacagaaagcacagcttccgccttgcttgctcgctcactcttgaatcaccagctgccatgtaacagcctgacttcctggagcctgccattttg

SEQ ID NO: 20764 - DNA, 122 bp, Homo sapiens
  misc_feature (61)..(62): /note="This region represents a CpG dinucleotide"
  misc_feature (61)..(61): /note="Nucleotide may be methylated to form 5-methylcytosine"
ctggaaagagaactctggtttggaggggttcccaggcctctcactttaggtactgcaggacgcaagggatcatgtctgcaagctggtccagagatgggtactgatatctggaaaagagaggc

SEQ ID NO: 20765 - DNA, 122 bp, Homo sapiens
  misc_feature (61)..(62): /note="This region represents a CpG dinucleotide"
  misc_feature (61)..(61): /note="Nucleotide may be methylated to form 5-methylcytosine"
tttctgtaattcagctgttcctaagtttcctatgttaacagcagtgatggttcctcatctcgcttgattaggaggaagtcctgtttgttaccttcttcctctttttgagactctccagtaat

SEQ ID NO: 20766 - DNA, 122 bp, Homo sapiens
  misc_feature (61)..(62): /note="This region represents a CpG dinucleotide"
  misc_feature (61)..(61): /note="Nucleotide may be methylated to form 5-methylcytosine"
gattaaagagctgttataactctctgtttattttaggaaagattaatggttccccctcctcgtttctcagggacagactttaatctgtctagagtgagtcatgaaatatatcagctcaaccg

SEQ ID NO: 20767 - DNA, 122 bp, Homo sapiens
  misc_feature (61)..(62): /note="This region represents a CpG dinucleotide"
  misc_feature (61)..(61): /note="Nucleotide may be methylated to form 5-methylcytosine"
gcatctagagcagggcctggcacaaagtaggagctcaataaacatttatgaatgagtgtgcgctgagatgacctttttttttttttttattgagagggagccttgctctgtcacccaggcta

SEQ ID NO: 20768 - DNA, 122 bp, Homo sapiens
  misc_feature (61)..(62): /note="This region represents a CpG dinucleotide"
  misc_feature (61)..(61): /note="Nucleotide may be methylated to form 5-methylcytosine"
gaggggtcccctgtgccttctaggactagctccagtgccctgggatcccagagtgcatggcgctcagggagaaacgcgtttgcatgtttcagtttcacagtttgcctggggcggtcttgtta

SEQ ID NO: 20769 - DNA, 122 bp, Homo sapiens
  misc_feature (61)..(62): /note="This region represents a CpG dinucleotide"
  misc_feature (61)..(61): /note="Nucleotide may be methylated to form 5-methylcytosine"
aaggctaagataggagtgtggacaaaatatcagcagcatcccatggcaacacattcctgtcgtaagcatcacactcttccaaagaaaagatcaagctgcatttaagtttcaggtggggcatg

SEQ ID NO: 20770 - DNA, 122 bp, Homo sapiens
  misc_feature (61)..(62): /note="This region represents a CpG dinucleotide"
  misc_feature (61)..(61): /note="Nucleotide may be methylated to form 5-methylcytosine"
ttcatgtgagcttgttccttcagagctcttggctacaggattgcaaacaacatcctaaaacgtggagctgcaaaccttggtgatttaaatgctcgctgccaggcaaattgcggtgacataaa

SEQ ID NO: 20771 - DNA, 122 bp, Homo sapiens
  misc_feature (61)..(62): /note="This region represents a CpG dinucleotide"
  misc_feature (61)..(61): /note="Nucleotide may be methylated to form 5-methylcytosine"
agtaacaacatcttgttattttaaatctccctctgcttaagataactgccagactgagaccgtacattcttcgtcacaatcccaaaaccctctgggtaggaaatgaggattggtcagagaac

SEQ ID NO: 20772 - DNA, 122 bp, Homo sapiens
  misc_feature (61)..(62): /note="This region represents a CpG dinucleotide"
  misc_feature (61)..(61): /note="Nucleotide may be methylated to form 5-methylcytosine"
gttgaaaggtttttccctctagctagtgaaagataaacttggaaatgcaggtttctccagcggttggtggtggggacaggggtcgcctagggaacttgcaggggccgcggcctctgttgtgc

SEQ ID NO: 20773 - DNA, 122 bp, Homo sapiens
  misc_feature (61)..(62): /note="This region represents a CpG dinucleotide"
  misc_feature (61)..(61): /note="Nucleotide may be methylated to form 5-methylcytosine"
ggttaagtaacctgaacaaggccacacagtaaggggtaaagcctggctttgaacccactccggtttgacaccaagataagtcgtcatgacttgctgcgcctcttgaaagaaatcctgaaagt

SEQ ID NO: 20774 - DNA, 122 bp, Homo sapiens
  misc_feature (61)..(62): /note="This region represents a CpG dinucleotide"
  misc_feature (61)..(61): /note="Nucleotide may be methylated to form 5-methylcytosine"
tttgcttggatagggggttggcttctcaatagaggtggtgtcatgttgtgctgggaagatcgggacaatgattccaatggcacagtaccagggacccactgagatcctacttgacaggtcca

SEQ ID NO: 20775 - DNA, 122 bp, Homo sapiens
  misc_feature (61)..(62): /note="This region represents a CpG dinucleotide"
  misc_feature (61)..(61): /note="Nucleotide may be methylated to form 5-methylcytosine"
ttacttggtttttgtactaaagcagctgtcctttcttcaaatcatgcatgaagcaaacatcgtccctcatctcacttttctgtgggtgatggaaagccgtgggagatattactgaaaaagga

SEQ ID NO: 20776 - DNA, 122 bp, Homo sapiens
  misc_feature (61)..(62): /note="This region represents a CpG dinucleotide"
  misc_feature (61)..(61): /note="Nucleotide may be methylated to form 5-methylcytosine"
caacttggttttatacttgggaatgagacaggagttcagcaggacttgtttcacaagatacgaatcacaaagaccttgctggtaaaacaggatgcaataaagaagccagccaaaatctgcca

SEQ ID NO: 20777 - DNA, 122 bp, Homo sapiens
  misc_feature (61)..(62): /note="This region represents a CpG dinucleotide"
  misc_feature (61)..(61): /note="Nucleotide may be methylated to form 5-methylcytosine"
tgctgtacaggtttgtagcccaggggcaacaggtgatcccctctaacctggatgtgtggtcgcctgtaccatctaggtctgtgtgaacacactctctggtgttcctatcatgacaaaatcct

SEQ ID NO: 20778 - DNA, 122 bp, Homo sapiens
  misc_feature (61)..(62): /note="This region represents a CpG dinucleotide"
  misc_feature (61)..(61): /note="Nucleotide may be methylated to form 5-methylcytosine"
cttactctgggatgacaggtgtatacgaggatgtagctgggcaagccaggcctagtggctcgcacactcatcagttagatggtgggtgctggtgctgctggtgcatcatgcatacaaggctg

SEQ ID NO: 20779 - DNA, 122 bp, Homo sapiens
  misc_feature (61)..(62): /note="This region represents a CpG dinucleotide"
  misc_feature (61)..(61): /note="Nucleotide may be methylated to form 5-methylcytosine"
tctcagtggctcaagtttagtaagactgggaactcagtcaagtcaacagagcccagcacacggcagaagagatggaaagatagacatgcagagttcaggttctgaatgacaagtgtcggcat

SEQ ID NO: 20780 - DNA, 122 bp, Homo sapiens
  misc_feature (61)..(62): /note="This region represents a CpG dinucleotide"
  misc_feature (61)..(61): /note="Nucleotide may be methylated to form 5-methylcytosine"
gagtcaaaatgaaataggcaggtaaggctgaaagaatgctctagtcacaggaagagcctacgcaattcgtggaggtgagtcatggttagagaaggatcctagttccacatggttgtagaaca

SEQ ID NO: 20781 - DNA, 122 bp, Homo sapiens
  misc_feature (61)..(62): /note="This region represents a CpG dinucleotide"
  misc_feature (61)..(61): /note="Nucleotide may be methylated to form 5-methylcytosine"
attcccagctcccagaaaaaaaccacaccagccctggaaaagcacaactctttttactaacgaggcctgggagaaagttctcccctatgtcctcatataccctgaagtatattagggtaaac

SEQ ID NO: 20782 - DNA, 122 bp, Homo sapiens
  misc_feature (61)..(62): /note="This region represents a CpG dinucleotide"
  misc_feature (61)..(61): /note="Nucleotide may be methylated to form 5-methylcytosine"
tcttggatcttggatcactttatgacttgatctgaccaatggaatgctgcagaagtgacacggtaagtgctaggcacagtgactcacacctgtaatcccagcactttgggaggccaaggcag

SEQ ID NO: 20783 - DNA, 122 bp, Homo sapiens
  misc_feature (61)..(62): /note="This region represents a CpG dinucleotide"
  misc_feature (61)..(61): /note="Nucleotide may be methylated to form 5-methylcytosine"
gttgccctcctatttccaacctcatccctacctccactgccacaatcccttccagccaagcgtgtctgagccattcctgttgacaggtacagacacagtgactatgacgtgctaacagagga

SEQ ID NO: 20784 - DNA, 122 bp, Homo sapiens
  misc_feature (61)..(62): /note="This region represents a CpG dinucleotide"
  misc_feature (61)..(61): /note="Nucleotide may be methylated to form 5-methylcytosine"
gtgactcaacatataatctacatcctaggggcagtggcacgaacataagtgttcaagatacgtggttggctggagatattgaagggaactaccacccttgcattaataagttgcatgaagtt

SEQ ID NO: 20785 - DNA, 122 bp, Homo sapiens
  misc_feature (61)..(62): /note="This region represents a CpG dinucleotide"
  misc_feature (61)..(61): /note="Nucleotide may be methylated to form 5-methylcytosine"
tgacctcgtgatccgcccgccttggcctcccaaagtgctgggattacaggcatgagccaccgctcctggctgagtctgcgatttcttgccagctctacccagttgtgtcatcttaagcaagt

SEQ ID NO: 20786 - DNA, 122 bp, Homo sapiens
  misc_feature (61)..(62): /note="This region represents a CpG dinucleotide"
  misc_feature (61)..(61): /note="Nucleotide may be methylated to form 5-methylcytosine"
caggggagctcagaggacacctggcctccttcaatccaggactcactgttgaagtggagccggggccctcgcaggaaagaatgagctgtgggagggccactggtccaccacagggagtctgt

SEQ ID NO: 20787 - DNA, 122 bp, Homo sapiens
  misc_feature (61)..(62): /note="This region represents a CpG dinucleotide"
  misc_feature (61)..(61): /note="Nucleotide may be methylated to form 5-methylcytosine"
aggactagggtacatccttaggacaagccattgtagctttttagccccatagggcacattcggcataccattcctttttttgcttcttttctccctttcttgatccacctccattctaagag

SEQ ID NO: 20788 - DNA, 122 bp, Homo sapiens
  misc_feature (61)..(62): /note="This region represents a CpG dinucleotide"
  misc_feature (61)..(61): /note="Nucleotide may be methylated to form 5-methylcytosine"
acagcaattcctggaggtatcaatcagcaaagccattctgcagggcaacttggcagcttccgtttgtacttaatataggtgtgcccctgccgacctagcagtttcacttcttgatagctaca

SEQ ID NO: 20789 - DNA, 122 bp, Homo sapiens
  misc_feature (61)..(62): /note="This region represents a CpG dinucleotide"
  misc_feature (61)..(61): /note="Nucleotide may be methylated to form 5-methylcytosine"
cacatctaaaagcgttaaacatgcatttctccaccttgtgctataagaacaaagcacatacgctaatattagatgaatcatgattctttcttacttctgcaagagctatcacatatatgaat

SEQ ID NO: 20790 - DNA, 122 bp, Homo sapiens
  misc_feature (61)..(62): /note="This region represents a CpG dinucleotide"
  misc_feature (61)..(61): /note="Nucleotide may be methylated to form 5-methylcytosine"
tccccccatatctccatctcttctcactggctatctatggtctgtgggtgaaccaagggacgttcctcctttgccatgaactttcagaggactgatgactcctgagcctgacttacagtctt

SEQ ID NO: 20791 - DNA, 122 bp, Homo sapiens
  misc_feature (61)..(62): /note="This region represents a CpG dinucleotide"
  misc_feature (61)..(61): /note="Nucleotide may be methylated to form 5-methylcytosine"
tgggtgagccacagttcagtgcatggcatgcgggaggccttcagtaagtggtagctaccccgtcatcatcactgtcacctgggatgtctccagcccgccctgtgtcagaaggcggccctcct

SEQ ID NO: 20792 - DNA, 122 bp, Homo sapiens
  misc_feature (61)..(62): /note="This region represents a CpG dinucleotide"
  misc_feature (61)..(61): /note="Nucleotide may be methylated to form 5-methylcytosine"
agtgatccacccacctcagcctcccaaagtgctgggattacaggcgtgagccaccacacccggcctgtaagctatattaaagagtttaaacctaatgctaagagcagtaaaatgccattgaa

SEQ ID NO: 20793 - DNA, 122 bp, Homo sapiens
  misc_feature (61)..(62): /note="This region represents a CpG dinucleotide"
  misc_feature (61)..(61): /note="Nucleotide may be methylated to form 5-methylcytosine"
tgtgtgatttactcctttaggatggcttagacccatgattgcatctgttcttgattatggcgccgcttttaaccacagagatgactcagcactggaaggttagctgtgctgcccaaggtcac

SEQ ID NO: 20794 - DNA, 122 bp, Homo sapiens
  misc_feature (61)..(62): /note="This region represents a CpG dinucleotide"
  misc_feature (61)..(61): /note="Nucleotide may be methylated to form 5-methylcytosine"
ttgtccataaatacagcatattgaagcaacccaaactctatggcccaactttacaagtgacgaaaagtactctgtgtttagaagagattgttgagacatcactcgggtgtgctcaaagagtg

SEQ ID NO: 20795 - DNA, 122 bp, Homo sapiens
  misc_feature (61)..(62): /note="This region represents a CpG dinucleotide"
  misc_feature (61)..(61): /note="Nucleotide may be methylated to form 5-methylcytosine"
gcttggggagcgtccttggggaccacattcagtagatggaaccacagggccgtaagggtgcgtccatgtgcattgcctggaaggtgaagcttgtagaaagcaaaggtttgtagaaggcgaag

SEQ ID NO: 20796 - DNA, 122 bp, Homo sapiens
  misc_feature (61)..(62): /note="This region represents a CpG dinucleotide"
  misc_feature (61)..(61): /note="Nucleotide may be methylated to form 5-methylcytosine"
ctgattagcccgttgttttccctgctccctggtggctgggaggctcccagcgaagcctggcggccttgctgcagccattccactgctcaggaatatggctctgaatggatactgtcaccctt

SEQ ID NO: 20797 - DNA, 122 bp, Homo sapiens
  misc_feature (61)..(62): /note="This region represents a CpG dinucleotide"
  misc_feature (61)..(61): /note="Nucleotide may be methylated to form 5-methylcytosine"
tgatttcctggggagaacagctgttctgtgcgcagaggccctcagctgtgggttctcattcgcgtgttcctaggtcacagtgacgtggacaaattgcccattccagaatacaatgggattga

SEQ ID NO: 20798 - DNA, 122 bp, Homo sapiens
  misc_feature (61)..(62): /note="This region represents a CpG dinucleotide"
  misc_feature (61)..(61): /note="Nucleotide may be methylated to form 5-methylcytosine"
gaatttcataggaatatctggcacactctagcattgtctccatgatatacttacataggtcgtactcagggcacacacagcatgaaatttaccaatgaagttctccagtatgttttcatatt

SEQ ID NO: 20799 - DNA, 122 bp, Homo sapiens
  misc_feature (61)..(62): /note="This region represents a CpG dinucleotide"
  misc_feature (61)..(61): /note="Nucleotide may be methylated to form 5-methylcytosine"
tgtaatagcagttcagactaagacagccccatattactcactctccatctgagagtgagccgagcacatagcattcttggcatcagtagcacaagggtatgaagggaaatgcttgaagataa

SEQ ID NO: 20800 - DNA, 122 bp, Homo sapiens
  misc_feature (61)..(62): /note="This region represents a CpG dinucleotide"
  misc_feature (61)..(61): /note="Nucleotide may be methylated to form 5-methylcytosine"
ggtgggaatgtgagcatcctcatacacagaaggcaggacaggagcatgctttggtgtgagcgtctggcaggcaatctggcagtaacatattacctttggaacatttgtgtgttttgcgtatt

SEQ ID NO: 20801 - DNA, 122 bp, Homo sapiens
  misc_feature (61)..(62): /note="This region represents a CpG dinucleotide"
  misc_feature (61)..(61): /note="Nucleotide may be methylated to form 5-methylcytosine"
aaagtactgtcctccctttggatttcttctgtctgggtgttgccagggctcttctgttagcgacagagaaaataggaggtactagaattcggacttctaggaagggctgtattgtccttatc

SEQ ID NO: 20802 - DNA, 122 bp, Homo sapiens
  misc_feature (61)..(62): /note="This region represents a CpG dinucleotide"
  misc_feature (61)..(61): /note="Nucleotide may be methylated to form 5-methylcytosine"
ttgacaatttgtttgtcacatgtttgttctcttgttcctcttcccccacctccccgcccacgcatagcttcgagttagaaaattgtgtgttcagatgccttgatccttcaagagacattttg

SEQ ID NO: 20803 - DNA, 122 bp, Homo sapiens
  misc_feature (61)..(62): /note="This region represents a CpG dinucleotide"
  misc_feature (61)..(61): /note="Nucleotide may be methylated to form 5-methylcytosine"
aatggggataaccctagtgtctcctgtacagggctgttgggaggatgaaatgggatgatacgtgtgaagcacttgaaatattgcttaccacactgtacatgggccaacaggtgtgtgtaatg

SEQ ID NO: 20804 - DNA, 122 bp, Homo sapiens
  misc_feature (61)..(62): /note="This region represents a CpG dinucleotide"
  misc_feature (61)..(61): /note="Nucleotide may be methylated to form 5-methylcytosine"
gactttctttgctgagtcacccaaggcatttcttcatttaaatgttcttccttggccaggcgcagtggctcaggcccaatgcggtggctcacgcctgtaatctcaacactttgggaggccga

SEQ ID NO: 20805 - DNA, 122 bp, Homo sapiens
  misc_feature (61)..(62): /note="This region represents a CpG dinucleotide"
  misc_feature (61)..(61): /note="Nucleotide may be methylated to form 5-methylcytosine"
cattgctccatctccattctctaataattctctaattcttgagatccatgccaatcttcacgtatctaatgcacatgtttgactgcatagagtatgtggttgattcagtcaataggcagtct

SEQ ID NO: 20806 - DNA, 122 bp, Homo sapiens
  misc_feature (61)..(62): /note="This region represents a CpG dinucleotide"
  misc_feature (61)..(61): /note="Nucleotide may be methylated to form 5-methylcytosine"
acaatctccaattgccagaagagatagctattgtacatgtcccagggcaccaaaacgactcgcctttcacaagtccaggaaataatcttgcagatcaaattgtgataccctatcttgtttta

SEQ ID NO: 20807 - DNA, 122 bp, Homo sapiens
  misc_feature (61)..(62): /note="This region represents a CpG dinucleotide"
  misc_feature (61)..(61): /note="Nucleotide may be methylated to form 5-methylcytosine"
tgtgctggaagggaaaggcgacagatcccagcttctgatgagtgtcctgtttcctgctcacgtagtacttccattctcttaaatccgaaggctaaacaaatcatggactaatatagactcgg

SEQ ID NO: 20808 - DNA, 122 bp, Homo sapiens
  misc_feature (61)..(62): /note="This region represents a CpG dinucleotide"
  misc_feature (61)..(61): /note="Nucleotide may be methylated to form 5-methylcytosine"
ctacaaaaacatagaaaggaaggaaataggatgtggcagccatgcttgtgaaaactacgtcggtgcttcaggccacagcagaggtttaaccggatgaacccagtggaatatacaagcctggg

SEQ ID NO: 20809 - DNA, 122 bp, Homo sapiens
  misc_feature (61)..(62): /note="This region represents a CpG dinucleotide"
  misc_feature (61)..(61): /note="Nucleotide may be methylated to form 5-methylcytosine"
ccaactgtgagctcctaatgtccagcaagtgacctggctcagtacatattgatgaataaacgaatgaacacatagaaggtgggaacggtgaatgattaaaatcattagctgtggcccaagag

SEQ ID NO: 20810 - DNA, 122 bp, Homo sapiens
  misc_feature (61)..(62): /note="This region represents a CpG dinucleotide"
  misc_feature (61)..(61): /note="Nucleotide may be methylated to form 5-methylcytosine"
cgcgctccgattggctgccgcttttgggcggattagaagctggattgtagcagagtgactcgcagaggccatgccccctcgtcttgtggcaggaccggaggggcgatcccggcatcccacgc

SEQ ID NO: 20811 - DNA, 122 bp, Homo sapiens
  misc_feature (61)..(62): /note="This region represents a CpG dinucleotide"
  misc_feature (61)..(61): /note="Nucleotide may be methylated to form 5-methylcytosine"
gcagcccaggtgtggttcgagatgtcactttggccccagtctttcctgctgcttcttgggcgccctgcccagccccagctagcccgacgcccctccagggcctcttgagtcatcactggtct

SEQ ID NO: 20812 - DNA, 122 bp, Homo sapiens
  misc_feature (61)..(62): /note="This region represents a CpG dinucleotide"
  misc_feature (61)..(61): /note="Nucleotide may be methylated to form 5-methylcytosine"
gaccctccagctgtatccacagttcggccaggaacaggctctgccagaggctagggccagcgctacatagtctgtggttaatggaggtgactagggaggggtgagcacaccagctgctctag

SEQ ID NO: 20813 - DNA, 122 bp, Homo sapiens
  misc_feature (61)..(62): /note="This region represents a CpG dinucleotide"
  misc_feature (61)..(61): /note="Nucleotide may be methylated to form 5-methylcytosine"
agcataatgcctggcccagctaaccactgaatgaatggtagctgttaacattaaccaatgcgtcattaaatcttcttttttgtgaggggactgggggattgttggctcccctgtggtctgct

SEQ ID NO: 20814 - DNA, 122 bp, Homo sapiens
  misc_feature (61)..(62): /note="This region represents a CpG dinucleotide"
  misc_feature (61)..(61): /note="Nucleotide may be methylated to form 5-methylcytosine"
ggagaataggtagggtggtattagcaatgaaagcacagacctcggagccgggagagaccacggaaatccgtagcccgatcccgctcactttatagaagaggaaacgaggctcagggagatgt

SEQ ID NO: 20815 - DNA, 122 bp, Homo sapiens
  misc_feature (61)..(62): /note="This region represents a CpG dinucleotide"
  misc_feature (61)..(61): /note="Nucleotide may be methylated to form 5-methylcytosine"
aagcagcagagaaggaggtgaggacagttcagaatgaagatgagtgattcaggaaaacaccgacacagataatgcaacttaaatggaagtaaatgtaattgcgaccaatgcaataaacttaa

SEQ ID NO: 20816 - DNA, 122 bp, Homo sapiens
  misc_feature (61)..(62): /note="This region represents a CpG dinucleotide"
  misc_feature (61)..(61): /note="Nucleotide may be methylated to form 5-methylcytosine"
gcaaagtgtggtttcaggaaactgttaaaagttcacatccttatctgaccctaatcctggcggcccagaacactgtgattcaaggaatgatgtggaagcactcggttgaaccagagcaagag

SEQ ID NO: 20817 - DNA, 122 bp, Homo sapiens
  misc_feature (61)..(62): /note="This region represents a CpG dinucleotide"
  misc_feature (61)..(61): /note="Nucleotide may be methylated to form 5-methylcytosine"
gaggatgggacacagggagtgtcagctgggggctagaatcttctcctgccaccaaggagccgtgtgactggggcaactcacctgccttctctgggccttgagttccttaacccaaaagtaag

SEQ ID NO: 20818 - DNA, 122 bp, Homo sapiens
  misc_feature (61)..(62): /note="This region represents a CpG dinucleotide"
  misc_feature (61)..(61): /note="Nucleotide may be methylated to form 5-methylcytosine"
ttccctttttgcgaatggcaaatgaaatttctcacacctggtcaaagcttctttctctgtcggaggtatcatccacagtggtagagaatctaaatatgcacgtgtctttatgagctgcctct

SEQ ID NO: 20819 - DNA, 122 bp, Homo sapiens
  misc_feature (61)..(62): /note="This region represents a CpG dinucleotide"
  misc_feature (61)..(61): /note="Nucleotide may be methylated to form 5-methylcytosine"
atcacctggaggtagcattctgaaagggcaagccccaaaacacaagcgttcttcaagctgcgtcttatatcaagcttgctgacatcccattggccaaagcaagtcacatggccaaatttcaa

SEQ ID NO: 20820 - DNA, 122 bp, Homo sapiens
  misc_feature (61)..(62): /note="This region represents a CpG dinucleotide"
  misc_feature (61)..(61): /note="Nucleotide may be methylated to form 5-methylcytosine"
gggttcagctgacccaggccctacccagctttgctccctatagccactttggtagcagaacgtgagatgggatccctgaaagccccatgccctgcccattaccagggacacataccccgtta

SEQ ID NO: 20821 - DNA, 122 bp, Homo sapiens
  misc_feature (61)..(62): /note="This region represents a CpG dinucleotide"
  misc_feature (61)..(61): /note="Nucleotide may be methylated to form 5-methylcytosine"
aatctggctcctctaattttaagaacagttaatgctccaccatgccttctttgattggtacgggatttgtctaagcctacctgcatattggggaagggaagatacaggttgagtagtaatgt

SEQ ID NO: 20822 - DNA, 122 bp, Homo sapiens
  misc_feature (61)..(62): /note="This region represents a CpG dinucleotide"
  misc_feature (61)..(61): /note="Nucleotide may be methylated to form 5-methylcytosine"
aagcagacaaggtggtggtcaatctgaaaacctgacacacaaggcacgaggaactcatagcgtaagcatctcattgccccattccttttactgtaaggagtgctaaagtaaagttgtcataa

SEQ ID NO: 20823 - DNA, 122 bp, Homo sapiens
  misc_feature (61)..(62): /note="This region represents a CpG dinucleotide"
  misc_feature (61)..(61): /note="Nucleotide may be methylated to form 5-methylcytosine"
acttacttgaaaaagagtcttggagagcctctgcacctcactttcctctcctcgagctgacgaggatgttattttgatgtttatctggtgccatggtaactttcatgacttgagatttactt

SEQ ID NO: 20824 - DNA, 122 bp, Homo sapiens
  misc_feature (61)..(62): /note="This region represents a CpG dinucleotide"
  misc_feature (61)..(61): /note="Nucleotide may be methylated to form 5-methylcytosine"
taactttttatggatacataatattttacatatgtatgggatatctgtgatattttgttacgtgcataggatgtgtaatgattaagtcagagcattagtggtatccatcactttgggaattt

SEQ ID NO: 20825 - DNA, 122 bp, Homo sapiens
  misc_feature (61)..(62): /note="This region represents a CpG dinucleotide"
  misc_feature (61)..(61): /note="Nucleotide may be methylated to form 5-methylcytosine"
gagagaaagaaaaaattagccccacacaccaggctgcctttggcatcaattgtcttatatcgcctacactgagcatttcctgtatggcagtcattctggttctattatttcatttaatcctc

SEQ ID NO: 20826 - DNA, 122 bp, Homo sapiens
  misc_feature (61)..(62): /note="This region represents a CpG dinucleotide"
  misc_feature (61)..(61): /note="Nucleotide may be methylated to form 5-methylcytosine"
ttcacaccattaacaatgaccagctgtgaagaagcagatcaccccacctgaggacagccccgaaggaagaggtgcttttaccaccacccaaggatgaaagcagtgatttctccttcaaatcc

SEQ ID NO: 20827 - DNA, 122 bp, Homo sapiens
  misc_feature (61)..(62): /note="This region represents a CpG dinucleotide"
  misc_feature (61)..(61): /note="Nucleotide may be methylated to form 5-methylcytosine"
cttgaatcataaaccaatctatttcctggtgctaaacctagcagacaaatcattctgtcccgtttttcaatgggaaaaagaaaggcttcaagaaatatgtacttgtcagtggactaggctgt

SEQ ID NO: 20828 - DNA, 122 bp, Homo sapiens
  misc_feature (61)..(62): /note="This region represents a CpG dinucleotide"
  misc_feature (61)..(61): /note="Nucleotide may be methylated to form 5-methylcytosine"
gccctgacaccctgacactggacatttctgggtgggtcataagaagtcacagcctgaggccgggcacggtggctcaggcctgtaatcccagcacttcgggaaggtgaggcaggagggtcact

SEQ ID NO: 20829 - DNA, 122 bp, Homo sapiens
  misc_feature (61)..(62): /note="This region represents a CpG dinucleotide"
  misc_feature (61)..(61): /note="Nucleotide may be methylated to form 5-methylcytosine"
accgtcctgtgactgtggggactggcaaagctaaatggcctgagtgggttgaactgtggccgcacctggttagcaccgttctttttcttcttctgaaggaaaggcgtggctgttccgaggtg

SEQ ID NO: 20830 - DNA, 122 bp, Homo sapiens
  misc_feature (61)..(62): /note="This region represents a CpG dinucleotide"
  misc_feature (61)..(61): /note="Nucleotide may be methylated to form 5-methylcytosine"
aagcctgctcaccacagtgaagagaaatcctgcattgtgatatggccttgctgaggaaagcgaaagttcctgaggaaaaggaaagcacagaagaggagagccgaggccacgagctggagaag

SEQ ID NO: 20831 - DNA, 122 bp, Homo sapiens
  misc_feature (61)..(62): /note="This region represents a CpG dinucleotide"
  misc_feature (61)..(61): /note="Nucleotide may be methylated to form 5-methylcytosine"
ggaagaggatgtggttttgtagctacgttacatcaggcaatgctccatgcgggaggctaccgcttagctcacaggtgctgctttacttactcattcttcacaaaggcatgcttgttgatggt

SEQ ID NO: 20832 - DNA, 122 bp, Homo sapiens
  misc_feature (61)..(62): /note="This region represents a CpG dinucleotide"
  misc_feature (61)..(61): /note="Nucleotide may be methylated to form 5-methylcytosine"
gatcagtgcctgccatactgtcagcactagtcgttactattttcactggttgaacagacacgtgagttcacacatgacaccatctattgggatgagtcacgttgcttgctcaacaactttaa

SEQ ID NO: 20833 - DNA, 122 bp, Homo sapiens
  misc_feature (61)..(62): /note="This region represents a CpG dinucleotide"
  misc_feature (61)..(61): /note="Nucleotide may be methylated to form 5-methylcytosine"
attcagtggtaaacaggacatcgactctgtccagaagtggatcggagcttctgggagctgcgtgaccgcttgtcagggcagtgacagatgtgtatgggtatttgggagcacagtgaaagcgc

SEQ ID NO: 20834 - DNA, 122 bp, Homo sapiens
  misc_feature (61)..(62): /note="This region represents a CpG dinucleotide"
  misc_feature (61)..(61): /note="Nucleotide may be methylated to form 5-methylcytosine"
taagggagaaacctgttttttcttatgcaatccccagagtgtaaacaggcaagttcgtctcgtctcttcaactgcttacttttgtattgttgttacctgtttgtggtttttttttgggtttt

SEQ ID NO: 20835 - DNA, 122 bp, Homo sapiens
  misc_feature (61)..(62): /note="This region represents a CpG dinucleotide"
  misc_feature (61)..(61): /note="Nucleotide may be methylated to form 5-methylcytosine"
cagccccagggcctggagttgcaagtgggcggggcggggccactggagctgtgacagcatcgagagcctcggtgactcacgtgggggccctctgtttcctccgggtgtgtcacgccctgggc

SEQ ID NO: 20836 - DNA, 122 bp, Homo sapiens
  misc_feature (61)..(62): /note="This region represents a CpG dinucleotide"
  misc_feature (61)..(61): /note="Nucleotide may be methylated to form 5-methylcytosine"
ctgcagaggtatgaggtgtggcttgggatttcatcatcatgtctcagaccaaagagtaagcgaaaggtagaaccatggcagagtcagtgctccagcaaatgatgggcagttgttttttgctc

SEQ ID NO: 20837 - DNA, 122 bp, Homo sapiens
  misc_feature (61)..(62): /note="This region represents a CpG dinucleotide"
  misc_feature (61)..(61): /note="Nucleotide may be methylated to form 5-methylcytosine"
tggtggtctggccattggcaacaacgatgtaaatcaattgctcagcattccttccagaggcgggacactgtaagcttggttatttcctaaggccagttcctggaactctttgagtaaaaggc

SEQ ID NO: 20838 - DNA, 122 bp, Homo sapiens
  misc_feature (61)..(62): /note="This region represents a CpG dinucleotide"
  misc_feature (61)..(61): /note="Nucleotide may be methylated to form 5-methylcytosine"
tagttgtctctaatcctttctttaaattcttcattatgaaacataaaaacaaatgccaggcgcggcagctcacgcctgtaatcccagcactttgggaggccgaagcgggcagatcacccgag

SEQ ID NO: 20839 - DNA, 122 bp, Homo sapiens
  misc_feature (61)..(62): /note="This region represents a CpG dinucleotide"
  misc_feature (61)..(61): /note="Nucleotide may be methylated to form 5-methylcytosine"
ttgggtaatttgagcttcaaaatctaaggtatgtgaccataaaatctcagaaggtaagaacggctacaggtgccaaaggtgagaacagccagagaacatattaagattctggaaccagaaga

SEQ ID NO: 20840 - DNA, 122 bp, Homo sapiens
  misc_feature (61)..(62): /note="This region represents a CpG dinucleotide"
  misc_feature (61)..(61): /note="Nucleotide may be methylated to form 5-methylcytosine"
tggttacaattttgtggtaggagtgataagtttgtcctcaaagctgaaggtaagaatatgcgtttacaacagatctgctcacttcagaatggcaatggtgcaacagaatcttaaaaacaaca

SEQ ID NO: 20841 - DNA, 122 bp, Homo sapiens
  misc_feature (61)..(62): /note="This region represents a CpG dinucleotide"
  misc_feature (61)..(61): /note="Nucleotide may be methylated to form 5-methylcytosine"
gttaaggcagaaaaacgcagataagaaaatcgaagttgagggcaaggagctcatctttcacggtcatagacctcagttgcaacatctggaaaaagagctggttgggcatgccgggcaggctt

SEQ ID NO: 20842 - DNA, 122 bp, Homo sapiens
  misc_feature (61)..(62): /note="This region represents a CpG dinucleotide"
  misc_feature (61)..(61): /note="Nucleotide may be methylated to form 5-methylcytosine"
aaaggaggtggagaaggagtaaccagtgaggtgggacaaaaccagagagggtgccaccagcgtttccacacgaagagtgttacaaaaataaggaagtgggcaggcacatcgaacgagctgaa

SEQ ID NO: 20843 - DNA, 122 bp, Homo sapiens
  misc_feature (61)..(62): /note="This region represents a CpG dinucleotide"
  misc_feature (61)..(61): /note="Nucleotide may be methylated to form 5-methylcytosine"
aactaagcaaaggatctataaagatcataacactaaatgccttttattttcctgggacttcgtttttcttcataagggcttcatagacaggatacagccagccctcctgtcatttgtaagca

SEQ ID NO: 20844 - DNA, 122 bp, Homo sapiens
  misc_feature (61)..(62): /note="This region represents a CpG dinucleotide"
  misc_feature (61)..(61): /note="Nucleotide may be methylated to form 5-methylcytosine"
cagcaccttccaggggttcccttcgtttgtgggctgggcccccagtgctgggctggaaatcgtctcttggtgcagtggttcatgagatcaggcagacgttttttagagtccaaatggcagac

SEQ ID NO: 20845 - DNA, 122 bp, Homo sapiens
  misc_feature (61)..(62): /note="This region represents a CpG dinucleotide"
  misc_feature (61)..(61): /note="Nucleotide may be methylated to form 5-methylcytosine"
tcacggattaggaaaaaaatccaaaagtcctgattattagttgcgaaatgaggttactgacgaggtccttggtgttagaggagcccaggttccttacagagccatgaaaaattaatgattgc

SEQ ID NO: 20846 - DNA, 122 bp, Homo sapiens
  misc_feature (61)..(62): /note="This region represents a CpG dinucleotide"
  misc_feature (61)..(61): /note="Nucleotide may be methylated to form 5-methylcytosine"
gtgaaaggtgtgtctcacactgagcagagtgagagccaacacttgggtcagagggaatggcgcaacaccaccctctgcagaggattccgtgggattgtgccatgagccaaataagcaatgaa

SEQ ID NO: 20847 - DNA, 122 bp, Homo sapiens
  misc_feature (61)..(62): /note="This region represents a CpG dinucleotide"
  misc_feature (61)..(61): /note="Nucleotide may be methylated to form 5-methylcytosine"
aatgggatcttaggccaggagcctattgttttcccatttgggctggttaagccatttatccggtactgccaagggaagcaacagggctggctcatacacccactttccctttggttgatatc

SEQ ID NO: 20848 - DNA, 122 bp, Homo sapiens
  misc_feature (61)..(62): /note="This region represents a CpG dinucleotide"
  misc_feature (61)..(61): /note="Nucleotide may be methylated to form 5-methylcytosine"
ccatgaatccagatgaacaaattccactccttttttgaacatatatccctctccttggcacgcctttgtctcatttcacatgcttcctcccgattggtccttaccttttacctgtttaacat

SEQ ID NO: 20849 - DNA, 122 bp, Homo sapiens
  misc_feature (61)..(62): /note="This region represents a CpG dinucleotide"
  misc_feature (61)..(61): /note="Nucleotide may be methylated to form 5-methylcytosine"
tgtcaacatttcacttgcaagactttgagaatgccactttacctgatcctagtccaggctcggggaggagctgacaaagagtcattttctaaaggaatttagggatagctgtaatcatccag

SEQ ID NO: 20850 - DNA, 122 bp, Homo sapiens
  misc_feature (61)..(62): /note="This region represents a CpG dinucleotide"
  misc_feature (61)..(61): /note="Nucleotide may be methylated to form 5-methylcytosine"
tcctctccatgtgaagacataaagaacagaaaaatcacttctgggctgtgataatatcaacgatgtctcttaggcaaaaagacctgctgagaaaaagaaatgtctgcaaggcacagatgtca

SEQ ID NO: 20851 - DNA, 122 bp, Homo sapiens
  misc_feature (61)..(62): /note="This region represents a CpG dinucleotide"
  misc_feature (61)..(61): /note="Nucleotide may be methylated to form 5-methylcytosine"
gtgtgtgtcataaagctaaataaggagccagttcagtccgccaccccccttcgcttctgccggccagacacacttccccatatgacagtcttataaatagctgctaagcagctggtcctcct

SEQ ID NO: 20852 - DNA, 122 bp, Homo sapiens
  misc_feature (61)..(62): /note="This region represents a CpG dinucleotide"
  misc_feature (61)..(61): /note="Nucleotide may be methylated to form 5-methylcytosine"
tacactcctgtagtttttctgttgtaacttcacagtctttctgctttggcatttgcatgacgtgtcaagcatgagtctgtggtcacaatgcctaatgaggtcacttggggagagacaaactc

SEQ ID NO: 20853 - DNA, 122 bp, Homo sapiens
  misc_feature (61)..(62): /note="This region represents a CpG dinucleotide"
  misc_feature (61)..(61): /note="Nucleotide may be methylated to form 5-methylcytosine"
caggaggggaaaggctctccttcaaaataatagtaacaatattagtaatgccacttattacgtgccaggcactgggttaggcactttttagacataattaaaatttagtccttgtaacagct

SEQ ID NO: 20854 - DNA, 122 bp, Homo sapiens
  misc_feature (61)..(62): /note="This region represents a CpG dinucleotide"
  misc_feature (61)..(61): /note="Nucleotide may be methylated to form 5-methylcytosine"
agtagtttgctgacccctgtcctgcagataatctccccaatcccatggatttaaatgtcacgtgtgtgctgacacacaggtttgggctggaaatacagtcctgatatctcccataattccag

SEQ ID NO: 20855 - DNA, 122 bp, Homo sapiens
  misc_feature (61)..(62): /note="This region represents a CpG dinucleotide"
  misc_feature (61)..(61): /note="Nucleotide may be methylated to form 5-methylcytosine"
tagtcactaaagttcctgtgaacatttgtaggtgttttcagctaagcagtaatagaaactcgacctccattttatatgaacaagtgtttattgatgtaccaaaggtttaaaggaagggaaag

SEQ ID NO: 20856 - DNA, 122 bp, Homo sapiens
  misc_feature (61)..(62): /note="This region represents a CpG dinucleotide"
  misc_feature (61)..(61): /note="Nucleotide may be methylated to form 5-methylcytosine"
ggccaagcccagcctgactcatggcaagccttcaacagatgtcagtaaaaggaactcaaccgtcaaatgcatagaatgaacatggggtcaactctcctccgtagctctcttccgcatgtggg

SEQ ID NO: 20857 - DNA, 122 bp, Homo sapiens
  misc_feature (61)..(62): /note="This region represents a CpG dinucleotide"
  misc_feature (61)..(61): /note="Nucleotide may be methylated to form 5-methylcytosine"
tataagttttgtaaaatctttgtggggagagaaaggggaaatacacactagactaggccacggcataatgtacctcccatgtgaatctggcttagtgtgcaaatgtatgttttcagagaagg

SEQ ID NO: 20858 - DNA, 122 bp, Homo sapiens
  misc_feature (61)..(62): /note="This region represents a CpG dinucleotide"
  misc_feature (61)..(61): /note="Nucleotide may be methylated to form 5-methylcytosine"
ggtgatccacccgcctcggcctcccaaagtgctgggattacaggcatgagccactgcgcccggccgtagtcaacagtttagagtcaacagccccagctgtcactcacaagtgtcattctggg

SEQ ID NO: 20859 - DNA, 122 bp, Homo sapiens
  misc_feature (61)..(62): /note="This region represents a CpG dinucleotide"
  misc_feature (61)..(61): /note="Nucleotide may be methylated to form 5-methylcytosine"
aatgacatgccaacttcattccttttattgccagatcagctccctagaggtcagagtgaccgtgtcacttgtctggtcacagagccagagagaacatgaactgggagatcaggtcagttgga

SEQ ID NO: 20860 - DNA, 122 bp, Homo sapiens
  misc_feature (61)..(62): /note="This region represents a CpG dinucleotide"
  misc_feature (61)..(61): /note="Nucleotide may be methylated to form 5-methylcytosine"
ttgcccatctacagcttcctgttggggatttgaacttgacttccaaggtctctgactcaccgatccaaccaaatccactttaatcatttccgattccctctcacatgtccttgggactggat

SEQ ID NO: 20861 - DNA, 122 bp, Homo sapiens
  misc_feature (61)..(62): /note="This region represents a CpG dinucleotide"
  misc_feature (61)..(61): /note="Nucleotide may be methylated to form 5-methylcytosine"
atttgctttactgcagtggtctcaaccaaacctacaacatttctgaggtgtgcctgtaatcgtaatctcagtttccctcactttaagaaatctttctgactatgcccaaacagaagtgtttt

SEQ ID NO: 20862 - DNA, 122 bp, Homo sapiens
  misc_feature (61)..(62): /note="This region represents a CpG dinucleotide"
  misc_feature (61)..(61): /note="Nucleotide may be methylated to form 5-methylcytosine"
gacctcggaaaggaagagcctggaggtcaaggtctggatcctgatcaaagaaaaccgaagcgcaaagaagggccaaggcttgcccaagtcacccagagggagtgtagcccaggagtcaggac

SEQ ID NO: 20863 - DNA, 122 bp, Homo sapiens
  misc_feature (61)..(62): /note="This region represents a CpG dinucleotide"
  misc_feature (61)..(61): /note="Nucleotide may be methylated to form 5-methylcytosine"
caaaaaaaaaaaaaagagtttaacactaattttttgaaagttagaggaagcagaatgcaccgcaagtaataaggagaaacaagattgattccagcgccgcacaaagggaaaccaccaattct

SEQ ID NO: 20864 - DNA, 122 bp, Homo sapiens
  misc_feature (61)..(62): /note="This region represents a CpG dinucleotide"
  misc_feature (61)..(61): /note="Nucleotide may be methylated to form 5-methylcytosine"
aatatacctagtgtgatccatccacacaatggaatatcactcagccatgaaaaggctgggcgaggtggctcatgtctgtaatcccagcactttgggaggccgaggcaggtagatcacgaggt

SEQ ID NO: 20865 - DNA, 122 bp, Homo sapiens
  misc_feature (61)..(62): /note="This region represents a CpG dinucleotide"
  misc_feature (61)..(61): /note="Nucleotide may be methylated to form 5-methylcytosine"
gcttcacaccaacaatctccaggtgttgaaagaagattatgtgaatgggaatgctgtgtgcgtgtgtgtatgcacgcacacatgcaattcaacaattactgaattcttcccatttgcatatt

SEQ ID NO: 20866 - DNA, 122 bp, Homo sapiens
  misc_feature (61)..(62): /note="This region represents a CpG dinucleotide"
  misc_feature (61)..(61): /note="Nucleotide may be methylated to form 5-methylcytosine"
ttgttgggttggggctttagatgtttttagggttgtcttgctgcattttgttgtagccgacggtgtatcacaattctagttagctcaggggctgtttaagtatttgacttatgatctaagta

SEQ ID NO: 20867 - DNA, 122 bp, Homo sapiens
  misc_feature (61)..(62): /note="This region represents a CpG dinucleotide"
  misc_feature (61)..(61): /note="Nucleotide may be methylated to form 5-methylcytosine"
gcagcctcaaaactcgtgatcccactgggtgcctgcaagccccagcctcttggagatgagcgggtaattaagttaatcccagggtttacagtaatgagtgctggagccacaggggaggggac

SEQ ID NO: 20868 - DNA, 122 bp, Homo sapiens
  misc_feature (61)..(62): /note="This region represents a CpG dinucleotide"
  misc_feature (61)..(61): /note="Nucleotide may be methylated to form 5-methylcytosine"
ccactgaattaattgccattgctcccagcacgcctggtagtctggcagcagacaaaatcacgtgaccgcaaaatggctaattcaggacatcagcccattatggtaggtgcccaaagggaaaa

SEQ ID NO: 20869 - DNA, 122 bp, Homo sapiens
  misc_feature (61)..(62): /note="This region represents a CpG dinucleotide"
  misc_feature (61)..(61): /note="Nucleotide may be methylated to form 5-methylcytosine"
tttatctgcagggcaccaagcaaggagaatcaggcagctcacactgtaagagccaaccttcgcaatagcttacaagcaagagtttttaaaagcagggataaatttcagggaagtagaagtta

SEQ ID NO: 20870 - DNA, 122 bp, Homo sapiens
  misc_feature (61)..(62): /note="This region represents a CpG dinucleotide"
  misc_feature (61)..(61): /note="Nucleotide may be methylated to form 5-methylcytosine"
caaatacacctctttgcatccacaaatcctgctcaccgagtcgagattctcccgtgatgacgctccaatcatccccgcacacgctggggaagacgcgtggctgtgggagccgagtggcacag

SEQ ID NO: 20871 - DNA, 122 bp, Homo sapiens
  misc_feature (61)..(62): /note="This region represents a CpG dinucleotide"
  misc_feature (61)..(61): /note="Nucleotide may be methylated to form 5-methylcytosine"
taatatttctaatgtagcttcaaagaagaaacacacattcttcataccactcttttagcacggaaggggtagtgttctattaaaccaagtaataggaccacttattaactttaactcataac

SEQ ID NO: 20872 - DNA, 122 bp, Homo sapiens
  misc_feature (61)..(62): /note="This region represents a CpG dinucleotide"
  misc_feature (61)..(61): /note="Nucleotide may be methylated to form 5-methylcytosine"
ctgctggtgaaatacctacaggaaggaatctagcattactcagctcctgaaaacctcttccgcccttgcagaagtgaaaggtctgctacagcggaagcctggtaattcaagattatactctc

SEQ ID NO: 20873 - DNA, 122 bp, Homo sapiens
  misc_feature (61)..(62): /note="This region represents a CpG dinucleotide"
  misc_feature (61)..(61): /note="Nucleotide may be methylated to form 5-methylcytosine"
cctaacagtatgccccactaacgaatgaggaaataggctcagagaagttaagtaacttgacgtcagttatccagctactaagtaaagaggcaggctctatgcaagactgattctttaaccac

SEQ ID NO: 20874 - DNA, 122 bp, Homo sapiens
  misc_feature (61)..(62): /note="This region represents a CpG dinucleotide"
  misc_feature (61)..(61): /note="Nucleotide may be methylated to form 5-methylcytosine"
gcctcggatctcattcctctcaatcgcactgatgcccatgtgacagcacgttgtctccaccgagactaatcccttatcaataagagctttcagcacggcccagaccagattactctgtctca

SEQ ID NO: 20875 - DNA, 122 bp, Homo sapiens
  misc_feature (61)..(62): /note="This region represents a CpG dinucleotide"
  misc_feature (61)..(61): /note="Nucleotide may be methylated to form 5-methylcytosine"
tctttcaactcacaggtttagatttgcagtcacactacctctcatgtggccacttctacacgtagcaggttccaggatatgtggtggcaaagaattgtttacttcaacatgcttaatttccc

SEQ ID NO: 20876 - DNA, 122 bp, Homo sapiens
  misc_feature (61)..(62): /note="This region represents a CpG dinucleotide"
  misc_feature (61)..(61): /note="Nucleotide may be methylated to form 5-methylcytosine"
gcacttctaggtaaccaatagaagcaaatgtaaatctttcctgtaaagatacaccttcatcgcaggcctcaaagaagtcctgctaacaatcatttaaagacaacaaacagtgagtcaaaaat

SEQ ID NO: 20877 - DNA, 122 bp, Homo sapiens
  misc_feature (61)..(62): /note="This region represents a CpG dinucleotide"
  misc_feature (61)..(61): /note="Nucleotide may be methylated to form 5-methylcytosine"
gcctcattggctgttgtgggtgtctctgaagctcatgttgaattgctgtcaaatgcccagcgtgttcttggtggtgacacagccacattgtgtaaatacatttcttaagtcatttgtgtgta

SEQ ID NO: 20878 - DNA, 122 bp, Homo sapiens
  misc_feature (61)..(62): /note="This region represents a CpG dinucleotide"
  misc_feature (61)..(61): /note="Nucleotide may be methylated to form 5-methylcytosine"
ttccaacagcctgctgatgcaaggagtggttcctcagctagcaagtctgcataatattgccggaagttcacaggctttctcagacccatccaaagatggatcctttaaaatcccagagacat

SEQ ID NO: 20879 - DNA, 122 bp, Homo sapiens
  misc_feature (61)..(62): /note="This region represents a CpG dinucleotide"
  misc_feature (61)..(61): /note="Nucleotide may be methylated to form 5-methylcytosine"
tgaatcaattacatccttccacgtaggagattttatttaatattcacaataaccttgtgacgttagcaaaggaacactagtagatccatgtcacaggatgaagcaattgaagctcagagaaa

SEQ ID NO: 20880 - DNA, 122 bp, Homo sapiens
  misc_feature (61)..(62): /note="This region represents a CpG dinucleotide"
  misc_feature (61)..(61): /note="Nucleotide may be methylated to form 5-methylcytosine"
aagtctttctggtcttgctggtcagagccagaagggccagtgcccggtccaggagcctctcgcaggccttgggctgcccatccaggcgtggcctttccttggccctttggacgacgacgccg

SEQ ID NO: 20881 - DNA, 122 bp, Homo sapiens
  misc_feature (61)..(62): /note="This region represents a CpG dinucleotide"
  misc_feature (61)..(61): /note="Nucleotide may be methylated to form 5-methylcytosine"
ataacagactaggaggagtcaccatctggccatcttgcctcatctgtgttttctcctttgcgttgctcaaccactaagccaatgtcacatactttagattttttttgttcaagttgcatctc

SEQ ID NO: 20882 - DNA, 122 bp, Homo sapiens
  misc_feature (61)..(62): /note="This region represents a CpG dinucleotide"
  misc_feature (61)..(61): /note="Nucleotide may be methylated to form 5-methylcytosine"
ctgaaggtgtcttaaagtagttaaagacaggttctctagaaagctgactcacagtggtttcgatggcttacatgggtcaaatttgaaacatccttgtactaaaacaaaatagcgtaccaagt

SEQ ID NO: 20883 - DNA, 122 bp, Homo sapiens
  misc_feature (61)..(62): /note="This region represents a CpG dinucleotide"
  misc_feature (61)..(61): /note="Nucleotide may be methylated to form 5-methylcytosine"
cctcaggtgatccgcctgcctcggcctcccaaagtgctgggattacagtgtgagccaccacgcctggcccaagctgtctttttattagcagaaaacaagagaagcctttcctaaccgtgatt

SEQ ID NO: 20884 - DNA, 122 bp, Homo sapiens
  misc_feature (61)..(62): /note="This region represents a CpG dinucleotide"
  misc_feature (61)..(61): /note="Nucleotide may be methylated to form 5-methylcytosine"
ccagcaactccctcgctgggtccgatatcccccttcacctcccttttagctggcactgcacgaatgcctccacagagaggctgacagtacagcagtcacctcccagctgtcttcggtgcatc

SEQ ID NO: 20885 - DNA, 122 bp, Homo sapiens
  misc_feature (61)..(62): /note="This region represents a CpG dinucleotide"
  misc_feature (61)..(61): /note="Nucleotide may be methylated to form 5-methylcytosine"
aaattccctcacgctgtagcacagtgtacttggctacttcaaccagaaattgtaaactggcggtctgtaggccaatttgaccacacatttattttgtttggctaatatggtggtttttgaga

SEQ ID NO: 20886 - DNA, 122 bp, Homo sapiens
  misc_feature (61)..(62): /note="This region represents a CpG dinucleotide"
  misc_feature (61)..(61): /note="Nucleotide may be methylated to form 5-methylcytosine"
acacagggtaagaattcacatgcttgctatagttcaattgtgggcagagtatgctttctacgtccttaatcttgatcttggctgggtgacttgttttggccaatgtgatgttgtagtgcata

SEQ ID NO: 20887 - DNA, 122 bp, Homo sapiens
  misc_feature (61)..(62): /note="This region represents a CpG dinucleotide"
  misc_feature (61)..(61): /note="Nucleotide may be methylated to form 5-methylcytosine"
cctcggcagtagacaggcagtgccaatgagagaagagggcgcggcgaaggtgatcccgcacgtaaagattccggactgccaagctcatgccacgcccagagacttcggaattctcaacaatg

SEQ ID NO: 20888 - DNA, 122 bp, Homo sapiens
  misc_feature (61)..(62): /note="This region represents a CpG dinucleotide"
  misc_feature (61)..(61): /note="Nucleotide may be methylated to form 5-methylcytosine"
cagcatcagagccgctgagtgatggtgaggtgtatgagggtggagacataaatcatatgacggtatctaaagccatgagacaagatgacctggggagtaaacatcactgttcttctgctcac

SEQ ID NO: 20889 - DNA, 122 bp, Homo sapiens
  misc_feature (61)..(62): /note="This region represents a CpG dinucleotide"
  misc_feature (61)..(61): /note="Nucleotide may be methylated to form 5-methylcytosine"
gacaagtgattaaaagcaaaagtctgagtcagactgcctaagtttgtatctcatttctgccgctactagtggtatgacctagggctagtagatcaacctctctgagcttcggtttcctaatc

SEQ ID NO: 20890 - DNA, 122 bp, Homo sapiens
  misc_feature (61)..(62): /note="This region represents a CpG dinucleotide"
  misc_feature (61)..(61): /note="Nucleotide may be methylated to form 5-methylcytosine"
ttgagggtgagtgtcaatttcatggttggaggccaactcttcttcccttctctctgcagccgtcatttcaccaagctgataatgttcggggaacccgccatcacgggctggtggagaggcca

SEQ ID NO: 20891 - DNA, 122 bp, Homo sapiens
  misc_feature (61)..(62): /note="This region represents a CpG dinucleotide"
  misc_feature (61)..(61): /note="Nucleotide may be methylated to form 5-methylcytosine"
tacggttatgtaaacagctttttcttgattcacttgccaggcttatacctttccccatcacgctagacagacagttctttgcagaaagctttctgatgggtgctacagatacagtggtggta

SEQ ID NO: 20892 - DNA, 122 bp, Homo sapiens
  misc_feature (61)..(62): /note="This region represents a CpG dinucleotide"
  misc_feature (61)..(61): /note="Nucleotide may be methylated to form 5-methylcytosine"
tcattacaattaaaaaccccacaccccacttcctgtattttacaacctataggcagcaaccgagcacaggcttactcagggaaggggtgatagagcaggcaaaagaagataattcttggctt

SEQ ID NO: 20893 - DNA, 122 bp, Homo sapiens
  misc_feature (61)..(62): /note="This region represents a CpG dinucleotide"
  misc_feature (61)..(61): /note="Nucleotide may be methylated to form 5-methylcytosine"
ggtcggtgatccactgcaagctgtccttcgcatagttttctactgccatcacttcatggacgcttagaaaggttttcttccttgcttggtaggggagggccatcagagtcaatagaatggcc

SEQ ID NO: 20894 - DNA, 122 bp, Homo sapiens
  misc_feature (61)..(62): /note="This region represents a CpG dinucleotide"
  misc_feature (61)..(61): /note="Nucleotide may be methylated to form 5-methylcytosine"
agagaaacgggtgatagcatctgtggccttcctgattcataggtttatcccagcatgaggcgtggctgctgcaaagcagacatgtccatttctgtccagacacagttggggcgggcagtggg

SEQ ID NO: 20895 - DNA, 122 bp, Homo sapiens
  misc_feature (61)..(62): /note="This region represents a CpG dinucleotide"
  misc_feature (61)..(61): /note="Nucleotide may be methylated to form 5-methylcytosine"
aggttaggcaggggaggagggacaaagagaggcggaaaaaagagaaaaaaatttacaagacgagaaaagaggagaggtggtaacatgcttccagacagctcagctgcctttctgtgcatcag

SEQ ID NO: 20896 - DNA, 122 bp, Homo sapiens
  misc_feature (61)..(62): /note="This region represents a CpG dinucleotide"
  misc_feature (61)..(61): /note="Nucleotide may be methylated to form 5-methylcytosine"
agcccctggcaaccacgaatctgctttctgcctctaggatttccttgtttgagatggcagcgtgtgcaaatggggcgtgtcacactcagtcttttattccagcttctttcacttgcaggatg

SEQ ID NO: 20897 - DNA, 122 bp, Homo sapiens
  misc_feature (61)..(62): /note="This region represents a CpG dinucleotide"
  misc_feature (61)..(61): /note="Nucleotide may be methylated to form 5-methylcytosine"
attcaaacaagttggaggcgctgaggttgccaagtgcaaccaggtctggcacagacttggcgtgagagagagcaggagcaagaaggcttggacatcatgaatcactgaagccctggcccata

SEQ ID NO: 20898 - DNA, 122 bp, Homo sapiens
  misc_feature (61)..(62): /note="This region represents a CpG dinucleotide"
  misc_feature (61)..(61): /note="Nucleotide may be methylated to form 5-methylcytosine"
ggcttccacactacacccagactacaccaggagaaacagaatcatagttcacaacgcaaacgaatgccaggaatggtcagtgagtcaaaggaccagtcaaaaacaatcacacttgtgactag

SEQ ID NO: 20899 - DNA, 122 bp, Homo sapiens
  misc_feature (61)..(62): /note="This region represents a CpG dinucleotide"
  misc_feature (61)..(61): /note="Nucleotide may be methylated to form 5-methylcytosine"
gctttccagctgttgcagaactaatggcacagaggaggaagctggggtggatgccacacacgcccatcagccacgagttagcaaaggaagcagagacctatttccaggggactttggcttct

SEQ ID NO: 20900 - DNA, 122 bp, Homo sapiens
  misc_feature (61)..(62): /note="This region represents a CpG dinucleotide"
  misc_feature (61)..(61): /note="Nucleotide may be methylated to form 5-methylcytosine"
ctgactaaacatctgcccaatgtatattctctttcctgaatctaagagaccacagactgacgaagaaggagaagggagaggggagtaggttacaaatgtctcccatatagtgagtgctaatt

SEQ ID NO: 20901 - DNA, 122 bp, Homo sapiens
  misc_feature (61)..(62): /note="This region represents a CpG dinucleotide"
  misc_feature (61)..(61): /note="Nucleotide may be methylated to form 5-methylcytosine"
tgaagggaaatggtcaaacttacaagaggatcctgtagctgaaaaacaaagataaatcaacgtgtacagcctgctgaaagaggagctagttttcgtactactttcctgaaaggaaatatcag

SEQ ID NO: 20902 - DNA, 122 bp, Homo sapiens
  misc_feature (61)..(62): /note="This region represents a CpG dinucleotide"
  misc_feature (61)..(61): /note="Nucleotide may be methylated to form 5-methylcytosine"
tcctgttcaaagagttggctttttccaggattcaggctttgtctgatgaacagcatggaccggattgtcatctgtgctcatacatcctgctgctaatagaagatgggcactatcttccaccc

SEQ ID NO: 20903 - DNA, 122 bp, Homo sapiens
  misc_feature (61)..(62): /note="This region represents a CpG dinucleotide"
  misc_feature (61)..(61): /note="Nucleotide may be methylated to form 5-methylcytosine"
aagttaaggcatttttaatcacaagaagagatagaaggtcagcaaaagatacaggtcatacggaccttgcagataaaacaggttgcagtaaagacgttggctaaatcccactaaaaccaaga

SEQ ID NO: 20904 - DNA, 122 bp, Homo sapiens
  misc_feature (61)..(62): /note="This region represents a CpG dinucleotide"
  misc_feature (61)..(61): /note="Nucleotide may be methylated to form 5-methylcytosine"
cccttctcccttcctctgagtcacaagagccccgtgctgttttgctctggtgagatgagccgcacagccacaggcctgtgtgtggagtgggcgggagccaggccaccttcctctggatgcag

SEQ ID NO: 20905 - DNA, 122 bp, Homo sapiens
  misc_feature (61)..(62): /note="This region represents a CpG dinucleotide"
  misc_feature (61)..(61): /note="Nucleotide may be methylated to form 5-methylcytosine"
tgtgagccaccccacccaggttgctgctaattttctgtatgcacacagtagaggctcactcgggactacaggaagtgccaccccgagcccacttcctcaccacaggcctttatcccttacct

SEQ ID NO: 20906 - DNA, 122 bp, Homo sapiens
  misc_feature (61)..(62): /note="This region represents a CpG dinucleotide"
  misc_feature (61)..(61): /note="Nucleotide may be methylated to form 5-methylcytosine"
taaatagcaactgtagtcagagggagagaggcccagggaggaacaataatctaactaagacgcttgacattggaaactcctggagggcagggcagagatcatgcaggagatttaacagcacc

SEQ ID NO: 20907 - DNA, 122 bp, Homo sapiens
  misc_feature (61)..(62): /note="This region represents a CpG dinucleotide"
  misc_feature (61)..(61): /note="Nucleotide may be methylated to form 5-methylcytosine"
tgtattaggttggcgcaaaagttatcgtggttttggtggccaaaaccacgataacttttgcgccaacctaatagcattgaggaaggtgctagcacagctttggtaatataaggaactctaat

SEQ ID NO: 20908 - DNA, 122 bp, Homo sapiens
  misc_feature (61)..(62): /note="This region represents a CpG dinucleotide"
  misc_feature (61)..(61): /note="Nucleotide may be methylated to form 5-methylcytosine"
ataagattgccagtggccagcagaagacgaaagggaatgcctgcctaggagagaagagcacgccttgtgcaaacatcaaagcgctgcttctaagaggggtaatttttatattgctattggca

SEQ ID NO: 20909 - DNA, 122 bp, Homo sapiens
  misc_feature (61)..(62): /note="This region represents a CpG dinucleotide"
  misc_feature (61)..(61): /note="Nucleotide may be methylated to form 5-methylcytosine"
ggtagcaacagtcagaggtcattctcagcagggattcactgactgcttaagctggatgagcgaccagggtgtgaccgtgtaagcatccggcaccaacagtccataggaactgtgtcgaaaca

SEQ ID NO: 20910 - DNA, 122 bp, Homo sapiens
  misc_feature (61)..(62): /note="This region represents a CpG dinucleotide"
  misc_feature (61)..(61): /note="Nucleotide may be methylated to form 5-methylcytosine"
cagagtacagagggttaaattgcaggaggtgaggaagtagagaccatggataaggctactcgcaggaagcctggctaagaacagggagtgagctaacaggaaatactggatcaaattgtatt

SEQ ID NO: 20911 - DNA, 122 bp, Homo sapiens
  misc_feature (61)..(62): /note="This region represents a CpG dinucleotide"
  misc_feature (61)..(61): /note="Nucleotide may be methylated to form 5-methylcytosine"
agaaaagaagagctgagcatttcacaaacggagagcaggtgtctggtgtttggtgtgttccggtcgagtgtagtcaggaaaaggaagccgcgttgtctgcggggcgggggcctgtgcttgtg

SEQ ID NO: 20912 - DNA, 122 bp, Homo sapiens
  misc_feature (61)..(62): /note="This region represents a CpG dinucleotide"
  misc_feature (61)..(61): /note="Nucleotide may be methylated to form 5-methylcytosine"
tgcgcctggccagattcctgttttctgtaactagtaacctcaagtattctgttttttatccgagcagcacagcaaaggtcatgagacatgcctgagcaggcataatctaactgtcatagttt

SEQ ID NO: 20913 - DNA, 122 bp, Homo sapiens
  misc_feature (61)..(62): /note="This region represents a CpG dinucleotide"
  misc_feature (61)..(61): /note="Nucleotide may be methylated to form 5-methylcytosine"
gtttgtttgtgcctggctgatttcacttagcataatgtcctcaaggcctatctcagtcagcgtgtgtcagagtttccttcctttttgaggctgaataatactcctttacatgtatgtggcac

SEQ ID NO: 20914 - DNA, 122 bp, Homo sapiens
  misc_feature (61)..(62): /note="This region represents a CpG dinucleotide"
  misc_feature (61)..(61): /note="Nucleotide may be methylated to form 5-methylcytosine"
tgttctgacagatggcatcgatgtggcagtcatctgtgccctctgagcactcatccacgtcgactgaccctgtgggtaggggtgtggggggaataagaggtaaggtgtggccccagggcagg

SEQ ID NO: 20915 - DNA, 122 bp, Homo sapiens
  misc_feature (61)..(62): /note="This region represents a CpG dinucleotide"
  misc_feature (61)..(61): /note="Nucleotide may be methylated to form 5-methylcytosine"
agaaaggttaatttgtgatgagtgatgggtggacagcaggcccggagtcagggagtctggcgaggtagtctgtgtaatttgaaggattgctgggaagggtaaggaattacctcattagcctt

SEQ ID NO: 20916 - DNA, 122 bp, Homo sapiens
  misc_feature (61)..(62): /note="This region represents a CpG dinucleotide"
  misc_feature (61)..(61): /note="Nucleotide may be methylated to form 5-methylcytosine"
tgtcctcttctagctatttcattcagctggctttccagtctatcagaaaaatgccatcatcggctgggtgtggtgactctcacctataatcccaacactttgggaggctgaggtgggcggat

SEQ ID NO: 20917 - DNA, 122 bp, Homo sapiens
  misc_feature (61)..(62): /note="This region represents a CpG dinucleotide"
  misc_feature (61)..(61): /note="Nucleotide may be methylated to form 5-methylcytosine"
tgactcagtcaaactctaagctcatctaaactctgagctcatgctttttagtctgtagatcgatgggtttaggtacagagaattttaggacttttctgcaatgttccatagagaaagtttat

SEQ ID NO: 20918 - DNA, 122 bp, Homo sapiens
  misc_feature (61)..(62): /note="This region represents a CpG dinucleotide"
  misc_feature (61)..(61): /note="Nucleotide may be methylated to form 5-methylcytosine"
tggactttaccctaagcagccagtgaagcctgggtgaggcctgagcagctgctgctggctcgtgtacagcagacaggcccttcaaccgaaatatccttagagaaattcttttatactggccc

SEQ ID NO: 20919 - DNA, 122 bp, Homo sapiens
  misc_feature (61)..(62): /note="This region represents a CpG dinucleotide"
  misc_feature (61)..(61): /note="Nucleotide may be methylated to form 5-methylcytosine"
atgaccaatcttgattcatctcagaatggacacagagaatccttgcaatccagagttcaccgtcactgcccttactgtgtaagagcacggtctccacagccacatttcctctaggctctgtc

SEQ ID NO: 20920 - DNA, 122 bp, Homo sapiens
  misc_feature (61)..(62): /note="This region represents a CpG dinucleotide"
  misc_feature (61)..(61): /note="Nucleotide may be methylated to form 5-methylcytosine"
ttatgctgtaagacccaaagtctgctgagggctgcccctgccaggtaacttccggagacccggagttacttggagacagacccggccctttgcacattccaagtgaaggacgtctcgcgcat

SEQ ID NO: 20921 - DNA, 122 bp, Homo sapiens
  misc_feature (61)..(62): /note="This region represents a CpG dinucleotide"
  misc_feature (61)..(61): /note="Nucleotide may be methylated to form 5-methylcytosine"
aggcgagtgaaggacctagggactggaatctcattggccccagggctgtgcccctggactcgctctcgggaagccaagccaggtccaactgataaccgcattccttgaggaccctcggccgg

SEQ ID NO: 20922 - DNA, 122 bp, Homo sapiens
  misc_feature (61)..(62): /note="This region represents a CpG dinucleotide"
  misc_feature (61)..(61): /note="Nucleotide may be methylated to form 5-methylcytosine"
tcttagaatgcagaatctcaggccccagcccaagctgctgagtcagcacctgcatctaaacgagcaaacatctcaagcctccatgtgcattgggagctctgcagagaaatcaagcagtgaga

SEQ ID NO: 20923 - DNA, 122 bp, Homo sapiens
  misc_feature (61)..(62): /note="This region represents a CpG dinucleotide"
  misc_feature (61)..(61): /note="Nucleotide may be methylated to form 5-methylcytosine"
actggattcttttctaaacattttgaagtttttattccctgtcatcaggtcattccaaaacgataaagcactaacttaagctagctggaattagagattagggggaacagtacacaaaagag

SEQ ID NO: 20924 - DNA, 122 bp, Homo sapiens
  misc_feature (61)..(62): /note="This region represents a CpG dinucleotide"
  misc_feature (61)..(61): /note="Nucleotide may be methylated to form 5-methylcytosine"
caagcctaggcgaacaacatgcatccataaaaagagcttcccataaccacctaccctgggcgctcagttagtacggtaaacagagcgcgagcattaaggctttttatgataattccccacaa

SEQ ID NO: 20925 - DNA, 122 bp, Homo sapiens
  misc_feature (61)..(62): /note="This region represents a CpG dinucleotide"
  misc_feature (61)..(61): /note="Nucleotide may be methylated to form 5-methylcytosine"
aaggcactcttccctcgattctgtcctctgtgattttttccctactgaaggttaagaaaccgagggtcagagaagacgagtgactggcccaggatgacgcggctatgaggttgtcaagcagg

SEQ ID NO: 20926 - DNA, 122 bp, Homo sapiens
  misc_feature (61)..(62): /note="This region represents a CpG dinucleotide"
  misc_feature (61)..(61): /note="Nucleotide may be methylated to form 5-methylcytosine"
attgaccacctagctgtcacttgctttcagttttcatcacagagcacatgtgggctgatccgtaagcaactcactcatccttttagaagtgcagaagaatggggcacatacaattatgttgt

SEQ ID NO: 20927 - DNA, 122 bp, Homo sapiens
  misc_feature (61)..(62): /note="This region represents a CpG dinucleotide"
  misc_feature (61)..(61): /note="Nucleotide may be methylated to form 5-methylcytosine"
ggttgcagtgagccgagattgtgccattgcactccagcctgagcgacaagagcaaaactccgtctcaaaaatagaaaaaagcagcaccctcacctgggcccccagccttcccctctcccacc

SEQ ID NO: 20928 - DNA, 122 bp, Homo sapiens
  misc_feature (61)..(62): /note="This region represents a CpG dinucleotide"
  misc_feature (61)..(61): /note="Nucleotide may be methylated to form 5-methylcytosine"
gcaagcaaagagagaatccaccatgacatgccatgaggtccaggtggttagagttcaaggcgagccagatacttaccacaggaaaccataaatgtgaagaaactctgctttcaggggcatat

SEQ ID NO: 20929 - DNA, 122 bp, Homo sapiens
  misc_feature (61)..(62): /note="This region represents a CpG dinucleotide"
  misc_feature (61)..(61): /note="Nucleotide may be methylated to form 5-methylcytosine"
gaagagaggcctggaaagaacttcaggacttgatgacattgttgagcctctacatgcctacgttagcacttttcttacatgaacaatagagaagattattattcagctaatatcctttctga

SEQ ID NO: 20930 - DNA, 122 bp, Homo sapiens
  misc_feature (61)..(62): /note="This region represents a CpG dinucleotide"
  misc_feature (61)..(61): /note="Nucleotide may be methylated to form 5-methylcytosine"
gtttgtccttatgactaactcgagtctagctggggcacaggccactgtcaaacagggcaacgcctactcagcgttttccaaactggtcaactgaactcttctctggaagggctgtctccttt

SEQ ID NO: 20931 - DNA, 122 bp, Homo sapiens
  misc_feature (61)..(62): /note="This region represents a CpG dinucleotide"
  misc_feature (61)..(61): /note="Nucleotide may be methylated to form 5-methylcytosine"
tgattacggtaagatggaagaggaaagtatcttgaggcttaaaagctgtgtaattccattcgtaggaaccagtatggcttactaaatacagtgttgtcatttcctgtgaaagagagagcgag

SEQ ID NO: 20932 - DNA, 122 bp, Homo sapiens
  misc_feature (61)..(62): /note="This region represents a CpG dinucleotide"
  misc_feature (61)..(61): /note="Nucleotide may be methylated to form 5-methylcytosine"
atatgcattcctctcaggtgagccaagggatgccctctaggcctgtctttgtcaaggtaccggtgaagataagctgttagtttacattgtcaaggtgaaatagaacagcgttctgttttagg

SEQ ID NO: 20933 - DNA, 122 bp, Homo sapiens
  misc_feature (61)..(62): /note="This region represents a CpG dinucleotide"
  misc_feature (61)..(61): /note="Nucleotide may be methylated to form 5-methylcytosine"
aagagggaaagacagactaacgtatcacaagtaaacatgacatgaaagaaaactgataaacgtagtggcaagtagtagatgtttaggtgactcaaataaggatcagatgtatgcaattacaa

SEQ ID NO: 20934 - DNA, 122 bp, Homo sapiens
  misc_feature (61)..(62): /note="This region represents a CpG dinucleotide"
  misc_feature (61)..(61): /note="Nucleotide may be methylated to form 5-methylcytosine"
ccacagacaccctccaccccccaacgccaggctgtgccccccattttccttccagccaggcgctcggccacgccctccaggttccacctcccaccacgtgccaagccacgtccccaagcccg

SEQ ID NO: 20935 - DNA, 122 bp, Homo sapiens
  misc_feature (61)..(62): /note="This region represents a CpG dinucleotide"
  misc_feature (61)..(61): /note="Nucleotide may be methylated to form 5-methylcytosine"
agatgatggggcggtaatttattcaagcagagacgatcaccgggctcctgtgtctgccctcgcgtcagaggagccgtgcaatggcagggggagggcaggtgtgtctgactgcacgcaggaat

SEQ ID NO: 20936 - DNA, 122 bp, Homo sapiens
  misc_feature (61)..(62): /note="This region represents a CpG dinucleotide"
  misc_feature (61)..(61): /note="Nucleotide may be methylated to form 5-methylcytosine"
atggattagcagcctttcttattagcaagaagccctgtggcctcaagaggcaaaatgaatcgtggttagaaatctccatctcctccctcccttggtataatgccatcatttaactatctgaa

SEQ ID NO: 20937 - DNA, 122 bp, Homo sapiens
  misc_feature (61)..(62): /note="This region represents a CpG dinucleotide"
  misc_feature (61)..(61): /note="Nucleotide may be methylated to form 5-methylcytosine"
ggcctttcttttcctgtactgtgctctacttccttatgcatgcttggtttcaaagatgaccgccactttaaaagaaagatttcctcacagctctccagagaactatcatactaaggtgatag

SEQ ID NO: 20938 - DNA, 122 bp, Homo sapiens
  misc_feature (61)..(62): /note="This region represents a CpG dinucleotide"
  misc_feature (61)..(61): /note="Nucleotide may be methylated to form 5-methylcytosine"
caagggctgaattaggaaacaagttcaagtcccccttgggggcaggaagggcaggaaaaccgtgaacatctgcatatcaaaggtttccgaggccagaactctcaccaatatttgactaacag

SEQ ID NO: 20939 - DNA, 122 bp, Homo sapiens
  misc_feature (61)..(62): /note="This region represents a CpG dinucleotide"
  misc_feature (61)..(61): /note="Nucleotide may be methylated to form 5-methylcytosine"
aagaatatatgacagaggctgtatgcagtgactcaacaccattgcagtcccaccccagagcgtggggagagccaggctgcagggtgcaaagccccaggccacttcctgctgactgtggctgc

SEQ ID NO: 20940 - DNA, 122 bp, Homo sapiens
  misc_feature (61)..(62): /note="This region represents a CpG dinucleotide"
  misc_feature (61)..(61): /note="Nucleotide may be methylated to form 5-methylcytosine"
gtcccgcctaagagggtcaccctaaaaacaaggaagtaggcagtccagtcctgacctgctcggagttgaagcagtcggcgttggaagagcctgaacacccggcctaccacttgtccttccat

SEQ ID NO: 20941 - DNA, 122 bp, Homo sapiens
  misc_feature (61)..(62): /note="This region represents a CpG dinucleotide"
  misc_feature (61)..(61): /note="Nucleotide may be methylated to form 5-methylcytosine"
agtcagagtattaataaacaaatcctgacatgtcagtgtgcttactccccacattttgaacggattaagttcaaatgcctcacaggatggcatttgaggtgctgatcctaatttatctttct

SEQ ID NO: 20942 - DNA, 122 bp, Homo sapiens
  misc_feature (61)..(62): /note="This region represents a CpG dinucleotide"
  misc_feature (61)..(61): /note="Nucleotide may be methylated to form 5-methylcytosine"
aaatagcacaccacagcccacagctctaccaaatggaggcataaagtgaggcagagaagtcggacagcttgagaacacgcatggccacaatgaatgacacaaaggaaaaggcaaaggcagca

SEQ ID NO: 20943 - DNA, 122 bp, Homo sapiens
  misc_feature (61)..(62): /note="This region represents a CpG dinucleotide"
  misc_feature (61)..(61): /note="Nucleotide may be methylated to form 5-methylcytosine"
gagaggccaagaatctgaacagacaggccctgctgggtttccatactcagtctattaggtcgtactctttttgtccaatcacatttctacacagttgaccatgctttgttcatgcctatcca

SEQ ID NO: 20944 - DNA, 122 bp, Homo sapiens
  misc_feature (61)..(62): /note="This region represents a CpG dinucleotide"
  misc_feature (61)..(61): /note="Nucleotide may be methylated to form 5-methylcytosine"
aagtcccctcatataaccattgtaaagaaatgcacttgctttatatttatatagctgatgcggctaactttgctaaacctaaactggttgtgttgcaaaacagtgtaacatgactgagtcat

SEQ ID NO: 20945 - DNA, 122 bp, Homo sapiens
  misc_feature (61)..(62): /note="This region represents a CpG dinucleotide"
  misc_feature (61)..(61): /note="Nucleotide may be methylated to form 5-methylcytosine"
cacccccaggtccctggcgaccaccaggaactgcggcttagagctaatgtgccacagtggcgagggaggaatgtgagctgagagtacttgagattaacacatatacaggcctgcattaggtc

SEQ ID NO: 20946 - DNA, 122 bp, Homo sapiens
  misc_feature (61)..(62): /note="This region represents a CpG dinucleotide"
  misc_feature (61)..(61): /note="Nucleotide may be methylated to form 5-methylcytosine"
ctctctgcctttccctctaatctgccttgaagccagcagttatcacctggatgcaccagacggaggatgctgacatgtgagatgctgtccccccaccgggagtgggagactcagtgaggctc

SEQ ID NO: 20947 - DNA, 122 bp, Homo sapiens
  misc_feature (61)..(62): /note="This region represents a CpG dinucleotide"
  misc_feature (61)..(61): /note="Nucleotide may be methylated to form 5-methylcytosine"
tgaaggtgggggcagggccttccttgtctttatgagtttataatatgtgaccagcaaacacgaaaccagcaagaaaccctgggatttatggcatggactatggaataaccctggactttcag

SEQ ID NO: 20948 - DNA, 122 bp, Homo sapiens
  misc_feature (61)..(62): /note="This region represents a CpG dinucleotide"
  misc_feature (61)..(61): /note="Nucleotide may be methylated to form 5-methylcytosine"
gaggctctggcggctgtggctcaccttaggtgtggggtgaggactggcagccccagctagcggcacccacagagcctgaagcctgcacacattctgcctgggtgtgtggggtgggtccgggc

SEQ ID NO: 20949 - DNA, 122 bp, Homo sapiens
  misc_feature (61)..(62): /note="This region represents a CpG dinucleotide"
  misc_feature (61)..(61): /note="Nucleotide may be methylated to form 5-methylcytosine"
gataccagcaggggtgatacatgaagaaaacccattataaatcttccgtgcatgccgttgcggggtggtgcgttgtcagacatagagattgaaatcactcagccttgtggtcatgaggcgtg

SEQ ID NO: 20950 - DNA, 122 bp, Homo sapiens
  misc_feature (61)..(62): /note="This region represents a CpG dinucleotide"
  misc_feature (61)..(61): /note="Nucleotide may be methylated to form 5-methylcytosine"
tcagccaagtaatcctcatctcacccagtgagtaagtttgaatgcgcacccttccctgtgcgaggatgaagaaaccaggacctgggtcaagaggattgttctaaattctccaatgaggcaat

SEQ ID NO: 20951 - DNA, 122 bp, Homo sapiens
  misc_feature (61)..(62): /note="This region represents a CpG dinucleotide"
  misc_feature (61)..(61): /note="Nucleotide may be methylated to form 5-methylcytosine"
atgacttaagaaagagaacaggaacaatacttcgttctctttttctcagatgagtaccttcgggaagaaggaaggaagggaggggagagggaggaagtcaacaaccctttgctttcctgaaa

SEQ ID NO: 20952 - DNA, 122 bp, Homo sapiens
  misc_feature (61)..(62): /note="This region represents a CpG dinucleotide"
  misc_feature (61)..(61): /note="Nucleotide may be methylated to form 5-methylcytosine"
aacagctgtactagggcgttgccatggaaactgcttgactcatggcagttgtgttagtgacgaagtcattagcagtgtgaaatgtactttgaggttgtcaagtgtaacactccgggaatatt

SEQ ID NO: 20953 - DNA, 122 bp, Homo sapiens
  misc_feature (61)..(62): /note="This region represents a CpG dinucleotide"
  misc_feature (61)..(61): /note="Nucleotide may be methylated to form 5-methylcytosine"
ggtgactgggcttttactattaatgtaaactgcctgggacgcagcccctgccatgggaaacgcagggcacttcctgttctcagcatagagtgacaaggaaatttactcagagcggttactct

SEQ ID NO: 20954 - DNA, 122 bp, Homo sapiens
  misc_feature (61)..(62): /note="This region represents a CpG dinucleotide"
  misc_feature (61)..(61): /note="Nucleotide may be methylated to form 5-methylcytosine"
catccccacattcacgtatcaagtcaacaagcttctcttttcctatggagttgcctaaagcgttaagcacagcagttaatcatatcctactgtaaattactttaattagataatagatcact

SEQ ID NO: 20955 - DNA, 122 bp, Homo sapiens
  misc_feature (61)..(62): /note="This region represents a CpG dinucleotide"
  misc_feature (61)..(61): /note="Nucleotide may be methylated to form 5-methylcytosine"
gctgaggcacagagaggttaaataacctgcctgagacaacacagctggtcagtagtggaccgggatttaaaccccacaatgctgctccagatttcacatcttaaccacttcctgcttccatg

SEQ ID NO: 20956 - DNA, 122 bp, Homo sapiens
  misc_feature (61)..(62): /note="This region represents a CpG dinucleotide"
  misc_feature (61)..(61): /note="Nucleotide may be methylated to form 5-methylcytosine"
taggatagagctactaccttgggaaacccccacatatcagtacatgtaagtctttatctgcgcctttcatattccccaggatagaattctacaatattcaatgttttgggtgcgatggggaa

SEQ ID NO: 20957 - DNA, 122 bp, Homo sapiens
  misc_feature (61)..(62): /note="This region represents a CpG dinucleotide"
  misc_feature (61)..(61): /note="Nucleotide may be methylated to form 5-methylcytosine"
ccagagaagcacacaatgtctttggcatgcatcctcatcaaggtattagtaaatacaaaacgatgttaggtgtagataaagtaggaatttgcatacttggagtgatttaagggcatcatcac

SEQ ID NO: 20958 - DNA, 122 bp, Homo sapiens
  misc_feature (61)..(62): /note="This region represents a CpG dinucleotide"
  misc_feature (61)..(61): /note="Nucleotide may be methylated to form 5-methylcytosine"
tgggagagaattactattttcaaatgttccttcctgaggtagcatagtccagaagtaagccgagagacaggatgctagagttctattcttggcccagctatgcaccttcagcaagatacatc

SEQ ID NO: 20959 - DNA, 122 bp, Homo sapiens
  misc_feature (61)..(62): /note="This region represents a CpG dinucleotide"
  misc_feature (61)..(61): /note="Nucleotide may be methylated to form 5-methylcytosine"
aaactggatttctggctcctcttgcaactcagaggattggacaagctgggccagcattcccgcatgggcacaaggagctggagctcagaggcactcccaactctggatgaggtgtggttttc

SEQ ID NO: 20960 - DNA, 122 bp, Homo sapiens
  misc_feature (61)..(62): /note="This region represents a CpG dinucleotide"
  misc_feature (61)..(61): /note="Nucleotide may be methylated to form 5-methylcytosine"
ctttgtgtcccctgtggttcactccctagttgcagagaatgccactacaagacttggggtcgtgggtgggcaatccatcccagctatgtgcagaaatgtttccctttaccacaatctctcag

SEQ ID NO: 20961 - DNA, 122 bp, Homo sapiens
  misc_feature (61)..(62): /note="This region represents a CpG dinucleotide"
  misc_feature (61)..(61): /note="Nucleotide may be methylated to form 5-methylcytosine"
acaaaacaaagtagatcaaaagttatttgcttaactgtgacaaacattaacaaaactgcacgttctacacatgtaccccagaacttaaagtataataaaaagtgtgacaaacataattcacg

SEQ ID NO: 20962 - DNA, 122 bp, Homo sapiens
  misc_feature (61)..(62): /note="This region represents a CpG dinucleotide"
  misc_feature (61)..(61): /note="Nucleotide may be methylated to form 5-methylcytosine"
tcatccaccgcttccggcctgagctcatgtgagtctggggcccaggctggcccctggagacgagggatgccaaggccattctgctgcatgcagaatcttcattacttggttcaatatttctc

SEQ ID NO: 20963 - DNA, 122 bp, Homo sapiens
  misc_feature (61)..(62): /note="This region represents a CpG dinucleotide"
  misc_feature (61)..(61): /note="Nucleotide may be methylated to form 5-methylcytosine"
taaagtggaagaagaaaatacccagatctttctgcatagtcaagtggcttatgttttgcacgcattggaaagaagggaaaacaaaagctgtcttagaagacgaaatcaatcacatgaggagt

SEQ ID NO: 20964 - DNA, 122 bp, Homo sapiens
  misc_feature (61)..(62): /note="This region represents a CpG dinucleotide"
  misc_feature (61)..(61): /note="Nucleotide may be methylated to form 5-methylcytosine"
ctaatacaaaatcacagtagactagggtgggcctctaatccaatatgactggtgtccttgcgaaagagagaatttgtacacaaagagagacactcagatagggagaaagcccagtggggatt

SEQ ID NO: 20965 - DNA, 122 bp, Homo sapiens
  misc_feature (61)..(62): /note="This region represents a CpG dinucleotide"
  misc_feature (61)..(61): /note="Nucleotide may be methylated to form 5-methylcytosine"
caaagcaggctaaggaaacaatggtcggcattgtttttccaagtctttctccaatccctccgctggcatggaaaccttccaggcctctctccaatcagggccacaccctcaccagtgctatg

SEQ ID NO: 20966 - DNA, 122 bp, Homo sapiens
  misc_feature (61)..(62): /note="This region represents a CpG dinucleotide"
  misc_feature (61)..(61): /note="Nucleotide may be methylated to form 5-methylcytosine"
aggttctcgtttcatcatttctccggtggcccagcaggcccaacagggacatgtccgtcacggtggtgtgttacatcatgtcagatggcaattgaatgcgctgttaacataagctgacagga

SEQ ID NO: 20967 - DNA, 122 bp, Homo sapiens
  misc_feature (61)..(62): /note="This region represents a CpG dinucleotide"
  misc_feature (61)..(61): /note="Nucleotide may be methylated to form 5-methylcytosine"
gtggccgaggcccaggtccttgtggcccctcccggtggggtgaaggtgcccgggactcctcggggttgcatggctacagccggggcgctgccagggcctcctctgcggctgagagatggaag

SEQ ID NO: 20968 - DNA, 122 bp, Homo sapiens
  misc_feature (61)..(62): /note="This region represents a CpG dinucleotide"
  misc_feature (61)..(61): /note="Nucleotide may be methylated to form 5-methylcytosine"
ccaataaaatgaatcaagagacttaagccagcctctgtccccagactttccttctttgggcgagatagaatctgaaaagttcaatcttgtaagagaaacacagtcagggtttttaagccttt

SEQ ID NO: 20969 - DNA, 122 bp, Homo sapiens
  misc_feature (61)..(62): /note="This region represents a CpG dinucleotide"
  misc_feature (61)..(61): /note="Nucleotide may be methylated to form 5-methylcytosine"
tttttcagcttctcttcctcaaagagacaaagctgttcctgaaatgaatgggcacatgtacgttgatgatgtatgttggctggccaagtgaaagagagtctcacctgcccattcaggatatg

SEQ ID NO: 20970 - DNA, 122 bp, Homo sapiens
  misc_feature (61)..(62): /note="This region represents a CpG dinucleotide"
  misc_feature (61)..(61): /note="Nucleotide may be methylated to form 5-methylcytosine"
tggcgtgcagccctgctggcgctaaccttccctggttactgtcctcccctccaactgctgcggaaccagcctctaactgcctgcacttccaactgccactgactcagaaccttctcagggtt

SEQ ID NO: 20971 - DNA, 122 bp, Homo sapiens
  misc_feature (61)..(62): /note="This region represents a CpG dinucleotide"
  misc_feature (61)..(61): /note="Nucleotide may be methylated to form 5-methylcytosine"
cactaatggatgggcagtaatgcactgatgaaccctaggggttgcaactggcctcacctacgttccccacatcttccccatcacctgctcctcctcctgcaccattttccattctgattaac

SEQ ID NO: 20972 - DNA, 122 bp, Homo sapiens
  misc_feature (61)..(62): /note="This region represents a CpG dinucleotide"
  misc_feature (61)..(61): /note="Nucleotide may be methylated to form 5-methylcytosine"
atttccagattgacacccagaccaaccctgacctggtgatcccctaggactgtctctgggcgatgtacacattaactgtgatgaactcagcgggctagattagtctctcgagtaaaccacag

SEQ ID NO: 20973 - DNA, 122 bp, Homo sapiens
  misc_feature (61)..(62): /note="This region represents a CpG dinucleotide"
  misc_feature (61)..(61): /note="Nucleotide may be methylated to form 5-methylcytosine"
cattacatttcaggccctgcaaatgcctaatggttataagggccctgagatcttcaaatgcgtactatagtagaagagcaaaggatcgttctggggataagggcgcacacggcacttggaaa

SEQ ID NO: 20974 - DNA, 122 bp, Homo sapiens
  misc_feature (61)..(62): /note="This region represents a CpG dinucleotide"
  misc_feature (61)..(61): /note="Nucleotide may be methylated to form 5-methylcytosine"
caaatttgagaggaattgcataaaacactggagaaatccaagaggggaagtccacaagggcggtggctccctccatgatctcagagcaagctggtgtcagaacctggacctagagcactgtt

SEQ ID NO: 20975 - DNA, 122 bp, Homo sapiens
  misc_feature (61)..(62): /note="This region represents a CpG dinucleotide"
  misc_feature (61)..(61): /note="Nucleotide may be methylated to form 5-methylcytosine"
taaaaacacgtagacacgaattaagaaaaggaggtccaagcttgagcaagcgatgacagccggtggtgtgtgagtcatggaggatgaatactaagtgcctggaactctgaggttcaatataa

SEQ ID NO: 20976 - DNA, 122 bp, Homo sapiens
  misc_feature (61)..(62): /note="This region represents a CpG dinucleotide"
  misc_feature (61)..(61): /note="Nucleotide may be methylated to form 5-methylcytosine"
cagttccttgcacatactaggtagagatacagaaaatatttcttctctagcccatactaccgaaaggttatttgtttgtttgtttttggtaatacaagcatatgtgtgtttgctcctcagta

SEQ ID NO: 20977 - DNA, 122 bp, Homo sapiens
  misc_feature (61)..(62): /note="This region represents a CpG dinucleotide"
  misc_feature (61)..(61): /note="Nucleotide may be methylated to form 5-methylcytosine"
agtgttgggattacaggtgtgagccaccgcacccggcctctgagaaatatttagattgtacgcctcaaatgggcagggactgtgtcttacacttttgtatttatgctacagcttacctaata

SEQ ID NO: 20978 - DNA, 122 bp, Homo sapiens
  misc_feature (61)..(62): /note="This region represents a CpG dinucleotide"
  misc_feature (61)..(61): /note="Nucleotide may be methylated to form 5-methylcytosine"
gaactagaaggataaaggaaaagagagaccagggcagtgagaccaggaagaaacaggaaacgagctgtgtagagcatactgtgcattctgttttatagctgccctgtaaattccaaaaaata

SEQ ID NO: 20979 - DNA, 122 bp, Homo sapiens
  misc_feature (61)..(62): /note="This region represents a CpG dinucleotide"
  misc_feature (61)..(61): /note="Nucleotide may be methylated to form 5-methylcytosine"
tcagcttatagcctttatcatctagtcttctattctctggagagtcagtggggactcttccgagttcttgtagccttttcttaaggcctataggaagtcatctgtgctgagcctgcactttc

SEQ ID NO: 20980 - DNA, 122 bp, Homo sapiens
  misc_feature (61)..(62): /note="This region represents a CpG dinucleotide"
  misc_feature (61)..(61): /note="Nucleotide may be methylated to form 5-methylcytosine"
aactgaaaaaaggaaaccagtttctaggtgggctctgttgcctgtatttgactcactcaccgataacacactcataaactgacacacacataaactctgttgggctctcaggatataagaac

SEQ ID NO: 20981 - DNA, 122 bp, Homo sapiens
  misc_feature (61)..(62): /note="This region represents a CpG dinucleotide"
  misc_feature (61)..(61): /note="Nucleotide may be methylated to form 5-methylcytosine"
atttggatttgaggaaaggagacttgagcgcaggagaaaggcacccaggagcctgtgagtcgtgcctaagcctctggatcccacatctgaggaaacaacttaatgtaagctttgagtggtgc

SEQ ID NO: 20982 - DNA, 122 bp, Homo sapiens
  misc_feature (61)..(62): /note="This region represents a CpG dinucleotide"
  misc_feature (61)..(61): /note="Nucleotide may be methylated to form 5-methylcytosine"
cagcatctcggaaggagccctggtgggtttaattatggagccggcgctgaccggcgtccccgccctccccacgcagcctccttggtgcggtccaacacatcaccgggcaagctgaggcctgc

SEQ ID NO: 20983 - DNA, 122 bp, Homo sapiens
  misc_feature (61)..(62): /note="This region represents a CpG dinucleotide"
  misc_feature (61)..(61): /note="Nucleotide may be methylated to form 5-methylcytosine"
aatgattcagtgagcaaattttgcaacctctgaactggaaggcggggataccaagcaagccgtgggtagggacacctgggcagtgactgcatgccctggaggccacttggatcccaagtaag

SEQ ID NO: 20984 - DNA, 122 bp, Homo sapiens
  misc_feature (61)..(62): /note="This region represents a CpG dinucleotide"
  misc_feature (61)..(61): /note="Nucleotide may be methylated to form 5-methylcytosine"
ggagcttgaggtgcttttgcaccaaaatataaattatcatgtgcactgtcacctcggggacgaaatgcagccctgcctaggagcagttggccaagatgcaaccagtcagtttggagccacgg

SEQ ID NO: 20985 - DNA, 122 bp, Homo sapiens
  misc_feature (61)..(62): /note="This region represents a CpG dinucleotide"
  misc_feature (61)..(61): /note="Nucleotide may be methylated to form 5-methylcytosine"
tgagtcagcctcacactcctgaggccattctgcacatttgccaacaacattcagagcagacgcgaccaaagtgtcataacaagcagactggtcagttgacaaagttagtttagagctgtagc

SEQ ID NO: 20986 - DNA, 122 bp, Homo sapiens
  misc_feature (61)..(62): /note="This region represents a CpG dinucleotide"
  misc_feature (61)..(61): /note="Nucleotide may be methylated to form 5-methylcytosine"
gattgtaagattatatgtattataagtatataatacatatacaaaatatgtgttaatcaacggtttatgttattggtaaggcatctggtcaacagtaaagttttgggggagtcaaaagttat

SEQ ID NO: 20987 - DNA, 122 bp, Homo sapiens
  misc_feature (61)..(62): /note="This region represents a CpG dinucleotide"
  misc_feature (61)..(61): /note="Nucleotide may be methylated to form 5-methylcytosine"
ttgaagtttaaaaagtgagcaacagaaaaacaccaagaggataatagtataggtcttacacggacttggcaaatgttatgactaaggaagtttggaaaatactacattatctttcaaaaact

SEQ ID NO: 20988 - DNA, 122 bp, Homo sapiens
  misc_feature (61)..(62): /note="This region represents a CpG dinucleotide"
  misc_feature (61)..(61): /note="Nucleotide may be methylated to form 5-methylcytosine"
acagttctacatactcaactctgagttgtctggcaagcataatggagggaggataccagccgtgaataattacagaataacctgtatcgtgtgatatgtttgaactgtcatacgtatgagtc

SEQ ID NO: 20989 - DNA, 122 bp, Homo sapiens
  misc_feature (61)..(62): /note="This region represents a CpG dinucleotide"
  misc_feature (61)..(61): /note="Nucleotide may be methylated to form 5-methylcytosine"
tactggtgaacagttgaaaggatggaaccaagtacagacacttggacatgtgtgctgggccgctggtgtctgtctactttaggttggcatcagttcattcactgtcaatcacaccatgcact

SEQ ID NO: 20990 - DNA, 122 bp, Homo sapiens
  misc_feature (61)..(62): /note="This region represents a CpG dinucleotide"
  misc_feature (61)..(61): /note="Nucleotide may be methylated to form 5-methylcytosine"
gcagacagtaaatgaaggtggcacagggttctctggcgtttgttgtattgatgcgcccagcgaaaggaaatttggcagctctttagaggtaatctgccttacaagggaccgtgagctgactg

SEQ ID NO: 20991 - DNA, 122 bp, Homo sapiens
  misc_feature (61)..(62): /note="This region represents a CpG dinucleotide"
  misc_feature (61)..(61): /note="Nucleotide may be methylated to form 5-methylcytosine"
tgtcagtatcatattcatgaagttcctgtaggaactgaaaagaccagagaaagaattgaacgggtaggaaagtagtgaatcatgtactgaatcatgtaccaaaaatgtagttttgttaaaac

SEQ ID NO: 20992 - DNA, 122 bp, Homo sapiens
  misc_feature (61)..(62): /note="This region represents a CpG dinucleotide"
  misc_feature (61)..(61): /note="Nucleotide may be methylated to form 5-methylcytosine"
ttctcaccaaaaactggcaacctaaatttaatcatgaagaatcaccagacaggccgggcacggtggctcactccttgggaggctaaggcggccaaatcacttgaggtcaggagtttgagatc

SEQ ID NO: 20993 - DNA, 122 bp, Homo sapiens
  misc_feature (61)..(62): /note="This region represents a CpG dinucleotide"
  misc_feature (61)..(61): /note="Nucleotide may be methylated to form 5-methylcytosine"
agttgaggggataagtacacactgacacacttgaagcacgaaataacaaggcatgcaatacgctgctaagtggtgagaagtagagagtgcaagaggggcttggaaaaggaagatcagagaag

SEQ ID NO: 20994 - DNA, 122 bp, Homo sapiens
  misc_feature (61)..(62): /note="This region represents a CpG dinucleotide"
  misc_feature (61)..(61): /note="Nucleotide may be methylated to form 5-methylcytosine"
atttctaaatcatgaacaccaaaggccttaaaattgggcattgggccatgtccaatccttcgatgtttagctattaagggagaaggaggcaacacagaggtcattgtatccatcacatttta

SEQ ID NO: 20995 - DNA, 122 bp, Homo sapiens
  misc_feature (61)..(62): /note="This region represents a CpG dinucleotide"
  misc_feature (61)..(61): /note="Nucleotide may be methylated to form 5-methylcytosine"
aatacgtttccttctacactgcttacatttccttttcatcggaactgcattcttgaataacgactaaaacaggaatagtgttctgcactttaaattcgggaaatgaccagtttcctgtgcca

SEQ ID NO: 20996 - DNA, 122 bp, Homo sapiens
  misc_feature (61)..(62): /note="This region represents a CpG dinucleotide"
  misc_feature (61)..(61): /note="Nucleotide may be methylated to form 5-methylcytosine"
attgggaaaacagtgcttgtcgcattgaaagcactgagtgttatctgttgttactatctacgagaaagaatttgcttagtatgtggggccatttcccaagtgagcctgtggtggtggtaggg

SEQ ID NO: 20997 - DNA, 122 bp, Homo sapiens
  misc_feature (61)..(62): /note="This region represents a CpG dinucleotide"
  misc_feature (61)..(61): /note="Nucleotide may be methylated to form 5-methylcytosine"
gggatagaggtaactaaacttgtgcttcatagctccaaggtaatttaattccctttctggcgagagtgcttgcaacactaactcaggcttctagtggtctgatgagcttaaaaatcaattaa

SEQ ID NO: 20998 - DNA, 122 bp, Homo sapiens
  misc_feature (61)..(62): /note="This region represents a CpG dinucleotide"
  misc_feature (61)..(61): /note="Nucleotide may be methylated to form 5-methylcytosine"
tccagacacggaagacagtggttttaatagagtaaaccaaaatgtaggatttgctctctccgatattctggaaaatcccactgctttagggcatagacttttcctgaaaatagaaggctgtg

SEQ ID NO: 20999 - DNA, 122 bp, Homo sapiens
  misc_feature (61)..(62): /note="This region represents a CpG dinucleotide"
  misc_feature (61)..(61): /note="Nucleotide may be methylated to form 5-methylcytosine"
aacagtggtaaggcgttcgcgagtcattgtaacgtaggcaggccgtgaacagtactaaggcgttcatgggtgtgtcactgtaacacaggcaagctgtgaaccgtagtaaggtgtccgcaagt

SEQ ID NO: 21000 - DNA, 122 bp, Homo sapiens
  misc_feature (61)..(62): /note="This region represents a CpG dinucleotide"
  misc_feature (61)..(61): /note="Nucleotide may be methylated to form 5-methylcytosine"
tgctctctgtcaaggcatgaataatacagcccctaggctgttggcagactccaaatgaggcgtgcatacatcaggaagcaagcccttgactttagctccagaacagcctcctgtgaagacag

SEQ ID NO: 21001 - DNA, 122 bp, Homo sapiens
  misc_feature (61)..(62): /note="This region represents a CpG dinucleotide"
  misc_feature (61)..(61): /note="Nucleotide may be methylated to form 5-methylcytosine"
ctattcgattttcacctcagtttccttaaaatgcaaattcaaggctatttagctgacaaccgcttagagtagtaaaacaggttatcaagaattcgaaggtgtggctgggcacggtggctcac

SEQ ID NO: 21002 - DNA, 122 bp, Homo sapiens
  misc_feature (61)..(62): /note="This region represents a CpG dinucleotide"
  misc_feature (61)..(61): /note="Nucleotide may be methylated to form 5-methylcytosine"
taatgtctgttgtggcctgaaaagcgtgtgttccttggctccttcctaggctcattcattcgctcatcaagctttgagtgagctcctgccctgtgcccacatgtaggaactcccctctctct

SEQ ID NO: 21003 - DNA, 122 bp, Homo sapiens
  misc_feature (61)..(62): /note="This region represents a CpG dinucleotide"
  misc_feature (61)..(61): /note="Nucleotide may be methylated to form 5-methylcytosine"
ctaatgttatccctcccccagccccccagcccccaacaggccccagtgtgtgatgtttcccgccctgtgtccaagtcagatctggctatttctaaaggccaggatgactcattttttcaagg

SEQ ID NO: 21004 - DNA, 122 bp, Homo sapiens
  misc_feature (61)..(62): /note="This region represents a CpG dinucleotide"
  misc_feature (61)..(61): /note="Nucleotide may be methylated to form 5-methylcytosine"
tgtgaagtgagcgctggagctgatgctcgctctgcttcagggcggttttcctggtgtgttcgcagtgtgacaggaaaatcaccttgcctggaaatggtccatatcagttagtagattgttgt

SEQ ID NO: 21005 - DNA, 122 bp, Homo sapiens
  misc_feature (61)..(62): /note="This region represents a CpG dinucleotide"
  misc_feature (61)..(61): /note="Nucleotide may be methylated to form 5-methylcytosine"
tgaaaagagcccattcagttcaccagacatgatctgagcccttacagtgtaccaggcccacgggatgctggaactacagaggtgactaagccacctttctggctcatggggagctcacctct

SEQ ID NO: 21006 - DNA, 122 bp, Homo sapiens
  misc_feature (61)..(62): /note="This region represents a CpG dinucleotide"
  misc_feature (61)..(61): /note="Nucleotide may be methylated to form 5-methylcytosine"
gccacagactccgtagatccggtacagtccacacacaggaaattcaggtacagccaggggcggccctgccagggacggtgtggttactgtgtttccatccatttggtgtttcgattttattc

SEQ ID NO: 21007 - DNA, 122 bp, Homo sapiens
  misc_feature (61)..(62): /note="This region represents a CpG dinucleotide"
  misc_feature (61)..(61): /note="Nucleotide may be methylated to form 5-methylcytosine"
gcctgcggtgtctgcttatggtcacatgggttcctgcagaacaggcctagcacacagccccgcacgatgacacatacagaaatgcatgcatgcactccgagccacacactcacaccccaccc

SEQ ID NO: 21008 - DNA, 122 bp, Homo sapiens
  misc_feature (61)..(62): /note="This region represents a CpG dinucleotide"
  misc_feature (61)..(61): /note="Nucleotide may be methylated to form 5-methylcytosine"
aggcatatagccttttggcactttacctgtgttccccaaattgcttttctcttttaaggacgttactattgatcatgtccctcatccctagtaaaaggagtgaaaggaaaatcattgataca

SEQ ID NO: 21009 - DNA, 122 bp, Homo sapiens
  misc_feature (61)..(62): /note="This region represents a CpG dinucleotide"
  misc_feature (61)..(61): /note="Nucleotide may be methylated to form 5-methylcytosine"
tgcaaaatgagttagccagaatgtatgtcctgtgccccatcatccagagaacttgcagagcgtgttctaaagcagttgtgccatcccatagtcagcccaacaggcctcttttgtgcacaggc

SEQ ID NO: 21010 - DNA, 122 bp, Homo sapiens
  misc_feature (61)..(62): /note="This region represents a CpG dinucleotide"
  misc_feature (61)..(61): /note="Nucleotide may be methylated to form 5-methylcytosine"
cgccccggggctctggtcccttccctgggggcggccgctgcgctagcggccgaggcttcccgttatcctgcaggcagcaagtcatcaccacctcgtggggccctggaggtgcattttcctca

SEQ ID NO: 21011 - DNA, 122 bp, Homo sapiens
  misc_feature (61)..(62): /note="This region represents a CpG dinucleotide"
  misc_feature (61)..(61): /note="Nucleotide may be methylated to form 5-methylcytosine"
gacgaaggcttcctgtggtttgggttgatgtatctctctgtcttgcaacactgagttccccgttgtctgggcggaagccagtcagacggaagcccggcttctgtggtgcctgccctggtggc

SEQ ID NO: 21012 - DNA, 122 bp, Homo sapiens
  misc_feature (61)..(62): /note="This region represents a CpG dinucleotide"
  misc_feature (61)..(61): /note="Nucleotide may be methylated to form 5-methylcytosine"
aggaatgtgagtatgacttagtcacctagtgatggtattctagattacgacccacagcaccggaggtgcatctgtgaggaggagctggcagctagcactgcagaacattatatagcccaaca

SEQ ID NO: 21013 - DNA, 122 bp, Homo sapiens
  misc_feature (61)..(62): /note="This region represents a CpG dinucleotide"
  misc_feature (61)..(61): /note="Nucleotide may be methylated to form 5-methylcytosine"
tttatctactgtgaggttcctggggcggagatgtgcagtggagcgagaacttcctgtgaccgtgacattgtctaggtggtgagcaggtgtgggggtgtggagagaggtgaggggctgaggta

SEQ ID NO: 21014 - DNA, 122 bp, Homo sapiens
  misc_feature (61)..(62): /note="This region represents a CpG dinucleotide"
  misc_feature (61)..(61): /note="Nucleotide may be methylated to form 5-methylcytosine"
gtatatgtcaacacatatgcccacgtgaatttcaaacaattaaacaagcgtaacacttgtcgtgcttattatgagccaggcatgttctaagtgcttcataagtatggtattaactcacttaa

SEQ ID NO: 21015 - DNA, 122 bp, Homo sapiens
  misc_feature (61)..(62): /note="This region represents a CpG dinucleotide"
  misc_feature (61)..(61): /note="Nucleotide may be methylated to form 5-methylcytosine"
gcaagcaggcttacagaagcagaacaaaggcagttaattaaattgcgacaggtctcgcaacgcaggcatagcttgtgatcatgcagctgcacagtagggaaaacaggaacttacaaaacttg

SEQ ID NO: 21016 - DNA, 122 bp, Homo sapiens
  misc_feature (61)..(62): /note="This region represents a CpG dinucleotide"
  misc_feature (61)..(61): /note="Nucleotide may be methylated to form 5-methylcytosine"
agagggaaagaatcttagcagcttgataccagcaacattcttgttgagtgtcacatgacacggatcctagagaattttaaaacattaactcactctgccctaaaaaactgtttacatagtcg

SEQ ID NO: 21017 - DNA, 122 bp, Homo sapiens
  misc_feature (61)..(62): /note="This region represents a CpG dinucleotide"
  misc_feature (61)..(61): /note="Nucleotide may be methylated to form 5-methylcytosine"
tacttttccttcctgggaaacttgtaattacagctgtaatgcagtcacagtttgtaattacgcttgtgtgcgtgcgtgcgtgtctgtgagccctactggatccaagccccagcaggcaagga

SEQ ID NO: 21018 - DNA, 122 bp, Homo sapiens
  misc_feature (61)..(62): /note="This region represents a CpG dinucleotide"
  misc_feature (61)..(61): /note="Nucleotide may be methylated to form 5-methylcytosine"
caagagcttctggacacagattctttggctccagtctttggttcaaacaaaaggcattttcgtaagcctctgtcttcttgccctgctttgagcaagttcagttcaaattctgagttgctttt

SEQ ID NO: 21019 - DNA, 122 bp, Homo sapiens
  misc_feature (61)..(62): /note="This region represents a CpG dinucleotide"
  misc_feature (61)..(61): /note="Nucleotide may be methylated to form 5-methylcytosine"
gagaggatagggagcttctgttatctcatttagtcctcggagtttaactcctggcacttccgtcacatctccaaatggtaagtgaaggttgttacttttcaatttggttgggctgtgtagca

SEQ ID NO: 21020 - DNA, 122 bp, Homo sapiens
  misc_feature (61)..(62): /note="This region represents a CpG dinucleotide"
  misc_feature (61)..(61): /note="Nucleotide may be methylated to form 5-methylcytosine"
gtcttaactgctcatttcttaaaatcttaagaaaaccccacaatttggacattttgcagacggaagtgagaaaaattcaatcattataatcatccctggtccccagccaaaaggaaagcttt

SEQ ID NO: 21021 - DNA, 122 bp, Homo sapiens
  misc_feature (61)..(62): /note="This region represents a CpG dinucleotide"
  misc_feature (61)..(61): /note="Nucleotide may be methylated to form 5-methylcytosine"
gaggtgctggctctgagctgtctgagtgccagggccacagatgactgcaggcagacacttcgtccttgctcctcccgccctcttgctcctgcagggcacctgggttttgggtgccttactcc

SEQ ID NO: 21022 - DNA, 122 bp, Homo sapiens
  misc_feature (61)..(62): /note="This region represents a CpG dinucleotide"
  misc_feature (61)..(61): /note="Nucleotide may be methylated to form 5-methylcytosine"
ctaatcagtgatgtttcatcaaaagaattacaactcagcttttcccataattcctgtcaccgttgcaagaatggagagatgcaggtgaacagccagccctgcatccgctgcagctccacact

SEQ ID NO: 21023 - DNA, 122 bp, Homo sapiens
  misc_feature (61)..(62): /note="This region represents a CpG dinucleotide"
  misc_feature (61)..(61): /note="Nucleotide may be methylated to form 5-methylcytosine"
agtggagctaagataaatcattagcaaccagtttctccctcaggatcaatgcagtgattacgaaagagagttgggtcatagtctatgcatgtaactggcctactttcaaacacacctttgcc

SEQ ID NO: 21024 - DNA, 122 bp, Homo sapiens
  misc_feature (61)..(62): /note="This region represents a CpG dinucleotide"
  misc_feature (61)..(61): /note="Nucleotide may be methylated to form 5-methylcytosine"
ctatatcagttatctactgctatgtaagtactccaatacttactggcttaatacagcaaccgtacatttactcatgatcctattgtttgtcagtttgagctgaacctagctgagtggctcgg

SEQ ID NO: 21025 - DNA, 122 bp, Homo sapiens
  misc_feature (61)..(62): /note="This region represents a CpG dinucleotide"
  misc_feature (61)..(61): /note="Nucleotide may be methylated to form 5-methylcytosine"
aggctgaggcaggagaatcgcttgaacctgggaggtggaggttgcagtgagccgagatcacgccagcctaggcgatagggcgaaactgtgtaaccgcccaccccgcccaaaaaaaaccgaag

SEQ ID NO: 21026 - DNA, 122 bp, Homo sapiens
  misc_feature (61)..(62): /note="This region represents a CpG dinucleotide"
  misc_feature (61)..(61): /note="Nucleotide may be methylated to form 5-methylcytosine"
tatgaatttgattctattattatcttcattttgtagataaggaagctaagaagacacagacgggttaagtaaccaagtttggacaagcaggaagtggagaactaagaattcacaatcaggca

SEQ ID NO: 21027 - DNA, 122 bp, Homo sapiens
  misc_feature (61)..(62): /note="This region represents a CpG dinucleotide"
  misc_feature (61)..(61): /note="Nucleotide may be methylated to form 5-methylcytosine"
catttcctttgcaccgcatgtcatccaaccagatggttccagttccctggccaaacgaagcgtccctcagggcagccagagcagagccacagcccagctgctgacacaccacttccgcctcg

SEQ ID NO: 21028 - DNA, 122 bp, Homo sapiens
  misc_feature (61)..(62): /note="This region represents a CpG dinucleotide"
  misc_feature (61)..(61): /note="Nucleotide may be methylated to form 5-methylcytosine"
agccccacatctcttagtatgcactcaagtagaccagggtgaaaaattcaatcatgaaaacgaaagaacttagaaccacaaatgtgagggctaggaggggcatcaacataactgaacctttc

SEQ ID NO: 21029 - DNA, 122 bp, Homo sapiens
  misc_feature (61)..(62): /note="This region represents a CpG dinucleotide"
  misc_feature (61)..(61): /note="Nucleotide may be methylated to form 5-methylcytosine"
gtgtgtgtgtgtgtgtgtgtctgttaaacagaccttgcaggataaactgctgctcacacccgcaaacaaagcaatatctgtttaataacgattgctgccatgggtacagtaaacaaggggcc

SEQ ID NO: 21030 - DNA, 122 bp, Homo sapiens
  misc_feature (61)..(62): /note="This region represents a CpG dinucleotide"
  misc_feature (61)..(61): /note="Nucleotide may be methylated to form 5-methylcytosine"
ttacagaataattctcttccaagagcaataaatatgcagctggacacatgcggcaagatccgtccttctaaatcactcttcctggagttaaagaaaacattgtctggacattcttgtgataa

SEQ ID NO: 21031 - DNA, 122 bp, Homo sapiens
  misc_feature (61)..(62): /note="This region represents a CpG dinucleotide"
  misc_feature (61)..(61): /note="Nucleotide may be methylated to form 5-methylcytosine"
ttgaatacagatgggaaataaaaatggaaagacagaatgagatgcacttgtgaagggctacgttctatcatcaatgaggaatcaaggaaggatctaaaacagggaaggacacagtcacattt

SEQ ID NO: 21032 - DNA, 122 bp, Homo sapiens
  misc_feature (61)..(62): /note="This region represents a CpG dinucleotide"
  misc_feature (61)..(61): /note="Nucleotide may be methylated to form 5-methylcytosine"
acgactagagcgcatgtcctgtctcatctgcgaaaatattccatagacacgttgtcacttcgcaataaatctatggttgcaactcaggcttaaaatgcaaatgcttttattaaaagttgtcg

SEQ ID NO: 21033 - DNA, 122 bp, Homo sapiens
  misc_feature (61)..(62): /note="This region represents a CpG dinucleotide"
  misc_feature (61)..(61): /note="Nucleotide may be methylated to form 5-methylcytosine"
tactttccctcttaagatttctggtttagctggtctgtccctcagtgagagtctctgtctcgttctctctctctctctctgtctcgctctgtctcctctctctctctccctctccctctttc

SEQ ID NO: 21034 - DNA, 122 bp, Homo sapiens
  misc_feature (61)..(62): /note="This region represents a CpG dinucleotide"
  misc_feature (61)..(61): /note="Nucleotide may be methylated to form 5-methylcytosine"
caacacagagaactgacagcttcaatggggacaatgcccagactaaacctttaaggaacccgtcatatgtatcacgaagtgacacatgcttaggagggacagaggagggcgagggagtgcag

SEQ ID NO: 21035 - DNA, 122 bp, Homo sapiens
  misc_feature (61)..(62): /note="This region represents a CpG dinucleotide"
  misc_feature (61)..(61): /note="Nucleotide may be methylated to form 5-methylcytosine"
tttggtgtctatcctctctttattttttagcagtcttttttttctcccaacttgtctcttcgtttggccctgtcttcaaaatgtatgtggaagttaaccaattcttactacctgcactgcta

SEQ ID NO: 21036 - DNA, 122 bp, Homo sapiens
  misc_feature (61)..(62): /note="This region represents a CpG dinucleotide"
  misc_feature (61)..(61): /note="Nucleotide may be methylated to form 5-methylcytosine"
gtggcttctgcaagactgactcaggggtaggccctgaggtggaaatgggctagtcactagcgggtgccaatgaagacatgaagtgatttttatacagtcatctggctgctatatacagtcgt

SEQ ID NO: 21037 - DNA, 122 bp, Homo sapiens
  misc_feature (61)..(62): /note="This region represents a CpG dinucleotide"
  misc_feature (61)..(61): /note="Nucleotide may be methylated to form 5-methylcytosine"
ctctctaagatgtgtgcagcttaccttgtcactccttactaaccgacttcttaaactatccggtgaaaagaacattaaagaaagagctatttcgtattggacccatgtagagaaatattcag

SEQ ID NO: 21038 - DNA, 122 bp, Homo sapiens
  misc_feature (61)..(62): /note="This region represents a CpG dinucleotide"
  misc_feature (61)..(61): /note="Nucleotide may be methylated to form 5-methylcytosine"
atctggccaggagaaagatggtcacttggctcagctccaaggaagtatgcctaagccttccgtttgagagctacatgcagaaactgagcatgatctataatcttggtgagatgctaggagtt

SEQ ID NO: 21039 - DNA, 122 bp, Homo sapiens
  misc_feature (61)..(62): /note="This region represents a CpG dinucleotide"
  misc_feature (61)..(61): /note="Nucleotide may be methylated to form 5-methylcytosine"
ggcaccttgtgcgccttctcttgagacagaggctctgtaacccccctcggcatcaaacttcgcactaccctccctttgccacggcatccttccttctcgtctcccgggaggccggacagaga

SEQ ID NO: 21040 - DNA, 122 bp, Homo sapiens
  misc_feature (61)..(62): /note="This region represents a CpG dinucleotide"
  misc_feature (61)..(61): /note="Nucleotide may be methylated to form 5-methylcytosine"
ggaagctgtgtgttcaccgtttaaaatagaactttcatttgtatgccttcgtacagcctacgtagcactataccatattctttttttacctttgttcagcaccttctcactagtgggtgctg

SEQ ID NO: 21041 - DNA, 122 bp, Homo sapiens
  misc_feature (61)..(62): /note="This region represents a CpG dinucleotide"
  misc_feature (61)..(61): /note="Nucleotide may be methylated to form 5-methylcytosine"
acagttaatacaaactagaaaagcagaattcgtgatggcctagagacatacccacggctgcgtaacagaaggggaattgcacagacagctttactgataagagaagtgactcaaactgctag

SEQ ID NO: 21042 - DNA, 122 bp, Homo sapiens
  misc_feature (61)..(62): /note="This region represents a CpG dinucleotide"
  misc_feature (61)..(61): /note="Nucleotide may be methylated to form 5-methylcytosine"
tcattgcagttgggagacagggtggggtgtgagacacacagccactgaatttcaaagcaacgtgataatgctagattatctgtaccttttcaaacgtgtatgcctagaacccaggactgtgc

SEQ ID NO: 21043 - DNA, 122 bp, Homo sapiens
  misc_feature (61)..(62): /note="This region represents a CpG dinucleotide"
  misc_feature (61)..(61): /note="Nucleotide may be methylated to form 5-methylcytosine"
aagtatactttgatttgagctttgcctaagtctatggcaaactgaattaagccactactacgttatagaaattacgtcattatttgcaggctaacttttccatttataactaacacatgcca

SEQ ID NO: 21044 - DNA, 122 bp, Homo sapiens
  misc_feature (61)..(62): /note="This region represents a CpG dinucleotide"
  misc_feature (61)..(61): /note="Nucleotide may be methylated to form 5-methylcytosine"
gaagggaatgacaggagctgactcatgccctagcaggacttctctgtctgctgtgttgagcgctggtgatgggggcgtgggaagaagttaggagccattacagaggtcccggtgggccatga

SEQ ID NO: 21045 - DNA, 122 bp, Homo sapiens
  misc_feature (61)..(62): /note="This region represents a CpG dinucleotide"
  misc_feature (61)..(61): /note="Nucleotide may be methylated to form 5-methylcytosine"
gccttgctctgcatttcccctcaagcctctgcttggagcaccctcaggaagtggaacaggcgtggcacagggactgtttttttcttatggtttaagatccgtatcacatgctttgatgtcat

SEQ ID NO: 21046 - DNA, 122 bp, Homo sapiens
  misc_feature (61)..(62): /note="This region represents a CpG dinucleotide"
  misc_feature (61)..(61): /note="Nucleotide may be methylated to form 5-methylcytosine"
gtagagtttgaagaagatactgatctcgagatttccgtgttttgtactgtttgtacaatacgtaaagcactactcaaaagcaatacagacagccttaaagaggaaggaagttctgccacatg

SEQ ID NO: 21047 - DNA, 122 bp, Homo sapiens
  misc_feature (61)..(62): /note="This region represents a CpG dinucleotide"
  misc_feature (61)..(61): /note="Nucleotide may be methylated to form 5-methylcytosine"
ggtatttcccatcaggactctgttcagagaacatatggagaaattagcactttcagactccgtgttgttaagctgtccctaccaaacacaagcaaacctcctgctatctacaggtctaactg

SEQ ID NO: 21048 - DNA, 122 bp, Homo sapiens
  misc_feature (61)..(62): /note="This region represents a CpG dinucleotide"
  misc_feature (61)..(61): /note="Nucleotide may be methylated to form 5-methylcytosine"
tgtaagttaggaaaaggatgatcacaaaggttgagtcacctgccaaagcccacataggtccgtagctgagctgggattggatggagccctgattcccctggctctgaggctgactcacttcc

SEQ ID NO: 21049 - DNA, 122 bp, Homo sapiens
  misc_feature (61)..(62): /note="This region represents a CpG dinucleotide"
  misc_feature (61)..(61): /note="Nucleotide may be methylated to form 5-methylcytosine"
gctttgttactttccagtcactctctcccgtaacacagcaccttggcacagaaagcagagcgacaaaacccagaatgaggacagttaaaattcaactcaagctacagccatcccaacggtcc

SEQ ID NO: 21050 - DNA, 122 bp, Homo sapiens
  misc_feature (61)..(62): /note="This region represents a CpG dinucleotide"
  misc_feature (61)..(61): /note="Nucleotide may be methylated to form 5-methylcytosine"
tctcctgaatgactagggctgacacctggttggggtggggcagagaggcgggcgggttggcggggtggaggcatctagtgctggcccgcccaccttattaatcttttcctttatccccattt

SEQ ID NO: 21051 - DNA, 122 bp, Homo sapiens
  misc_feature (61)..(62): /note="This region represents a CpG dinucleotide"
  misc_feature (61)..(61): /note="Nucleotide may be methylated to form 5-methylcytosine"
cacaaactttgttgaactgactctttaagtctgataagaaacatttgcaatctcctctgtcgcctgctacctggaagcctcatctgcatgataaaatcttggtttccacaaacccttatcat

SEQ ID NO: 21052 - DNA, 122 bp, Homo sapiens
  misc_feature (61)..(62): /note="This region represents a CpG dinucleotide"
  misc_feature (61)..(61): /note="Nucleotide may be methylated to form 5-methylcytosine"
tagagccactcttcctggtgctggactaagaggtgcaggcttggagggtgcagggcggtccgcctctcagacgtagaggcccggcctcggatgaaggcggaagggagggcaccgcctgttgc

SEQ ID NO: 21053 - DNA, 122 bp, Homo sapiens
  misc_feature (61)..(62): /note="This region represents a CpG dinucleotide"
  misc_feature (61)..(61): /note="Nucleotide may be methylated to form 5-methylcytosine"
ccactgcagagctgcaggtcccctccagggcagtggggagccacaagcagcgttaggcagcggctgggaccaggaccgcctgagcactcaagaacccccactgccccaagcactgctggcag

SEQ ID NO: 21054 - DNA, 122 bp, Homo sapiens
  misc_feature (61)..(62): /note="This region represents a CpG dinucleotide"
  misc_feature (61)..(61): /note="Nucleotide may be methylated to form 5-methylcytosine"
gggtgaggttgagtctatgtagaaatgttggcttctcagttctggcagagtcttatggtgcgtagaggtctgatggagttagggagtcagaggtgaaagctcagaggcaggtggatgtatgg

SEQ ID NO: 21055 - DNA, 122 bp, Homo sapiens
  misc_feature (61)..(62): /note="This region represents a CpG dinucleotide"
  misc_feature (61)..(61): /note="Nucleotide may be methylated to form 5-methylcytosine"
caagccttgggccccacccgcgctccacacaaaccccagatcccccagcccttccggggtcgccccctgggctcacctgggctcagtctcctgggctcagggttcagcagctccgggctctc

SEQ ID NO: 21056 - DNA, 122 bp, Homo sapiens
  misc_feature (61)..(62): /note="This region represents a CpG dinucleotide"
  misc_feature (61)..(61): /note="Nucleotide may be methylated to form 5-methylcytosine"
tttaaattagttcaagagttattacctacaacctaaagtatctgaactgagataactggtcgcctactgttttaactgccacacacccctttcttcttctggaaacactacttcccttcttt

SEQ ID NO: 21057 - DNA, 122 bp, Homo sapiens
  misc_feature (61)..(62): /note="This region represents a CpG dinucleotide"
  misc_feature (61)..(61): /note="Nucleotide may be methylated to form 5-methylcytosine"
tatcactacttttcatcacattttgaagatctgacttattaagtactttgcagtctctcccgtttgaatctgaagtgtagtggtagcagctagcacttgtcatatttcaggtttggtgtagt

SEQ ID NO: 21058 - DNA, 122 bp, Homo sapiens
  misc_feature (61)..(62): /note="This region represents a CpG dinucleotide"
  misc_feature (61)..(61): /note="Nucleotide may be methylated to form 5-methylcytosine"
gttgcaaattcttctgcatttcccatgcaatagcaaagcaagttgatcccataagctatccgtaagcttcaccaaatccaagagaatctatgcatagctgacttaggaaacagtaggtattt

SEQ ID NO: 21059 - DNA, 122 bp, Homo sapiens
  misc_feature (61)..(62): /note="This region represents a CpG dinucleotide"
  misc_feature (61)..(61): /note="Nucleotide may be methylated to form 5-methylcytosine"
gtgcaggcgccctctcgcctggcgctgccccgccccctcccccttgccagggctccctgccgggccgacacgttggctttgttggtttttaatcatagggggggaatttaaataaaatgttg

SEQ ID NO: 21060 - DNA, 122 bp, Homo sapiens
  misc_feature (61)..(62): /note="This region represents a CpG dinucleotide"
  misc_feature (61)..(61): /note="Nucleotide may be methylated to form 5-methylcytosine"
tagtgtctaaaagaagcctcatatcattccacaaatgctgtatcttttaaacattttaaacgtttgaaatgtcttcatctatgccatcccataataggaagattagtgggccttaacacatt

SEQ ID NO: 21061 - DNA, 122 bp, Homo sapiens
  misc_feature (61)..(62): /note="This region represents a CpG dinucleotide"
  misc_feature (61)..(61): /note="Nucleotide may be methylated to form 5-methylcytosine"
taatggaaaaacaatgccaattacagcagcattatccgggattataaagcttctaagaggcggctcacacctccaggcatgctgtgcctgggaatttccagggtagacttgggatcagagca

SEQ ID NO: 21062 - DNA, 122 bp, Homo sapiens
  misc_feature (61)..(62): /note="This region represents a CpG dinucleotide"
  misc_feature (61)..(61): /note="Nucleotide may be methylated to form 5-methylcytosine"
ggaggcttccgttatcgggaaaagatgctgtagtgatcttttctgagtgtctcctacttgcgacaaggtggacttgggaggaaagccgtctgccaaagcctgaagcctccaaggtatagatt

SEQ ID NO: 21063 - DNA, 122 bp, Homo sapiens
  misc_feature (61)..(62): /note="This region represents a CpG dinucleotide"
  misc_feature (61)..(61): /note="Nucleotide may be methylated to form 5-methylcytosine"
tcctgtttatttacaaagctctgactttagttactaccaaattccatcccctatgagttacgatggagaaagtgagtcatagtgataccacatgattatccatgagttaaaaatgagaagtg

SEQ ID NO: 21064 - DNA, 122 bp, Homo sapiens
  misc_feature (61)..(62): /note="This region represents a CpG dinucleotide"
  misc_feature (61)..(61): /note="Nucleotide may be methylated to form 5-methylcytosine"
cactccattgccccatatccctggagggaagaaccaaagcgactcaaaaatgtactcccacgagaagaaaaatcaagctatttggagtccaaatggtaaggaggcccagtgacaaggaaagc

SEQ ID NO: 21065 - DNA, 122 bp, Homo sapiens
  misc_feature (61)..(62): /note="This region represents a CpG dinucleotide"
  misc_feature (61)..(61): /note="Nucleotide may be methylated to form 5-methylcytosine"
aattatattggtcttaaatactaagacccattgcgccccatttagtgataagaaacatgacggtatctcctcagatactttgtttttaaagagcaggctaaagagattattgtattctgttt

SEQ ID NO: 21066 - DNA, 122 bp, Homo sapiens
  misc_feature (61)..(62): /note="This region represents a CpG dinucleotide"
  misc_feature (61)..(61): /note="Nucleotide may be methylated to form 5-methylcytosine"
atctgaaagaaccccaggtcttcagcaagtggagcaatttcctctgttaggatgtaagaccgaaagagacacacccacaaccagagtcacccacactccgatggggctagcgatagtcagtc

SEQ ID NO: 21067 - DNA, 122 bp, Homo sapiens
  misc_feature (61)..(62): /note="This region represents a CpG dinucleotide"
  misc_feature (61)..(61): /note="Nucleotide may be methylated to form 5-methylcytosine"
caacaatgaggcagaaaactcaggataggaagggacagagaaccaagatgatgaagtgcccgcaaaaacaagaagtaaagctctgagacatttcccagtgctaacagtgtactaaagatata

SEQ ID NO: 21068 - DNA, 122 bp, Homo sapiens
  misc_feature (61)..(62): /note="This region represents a CpG dinucleotide"
  misc_feature (61)..(61): /note="Nucleotide may be methylated to form 5-methylcytosine"
atctgccacccacacgaagacaaaacacaatggttatgcttcctcctcaacttcccaccccgtctgcaaaaggggaagaaatggacgctcacccacagccagtcacaaggacggggcctgcg

SEQ ID NO: 21069 - DNA, 122 bp, Homo sapiens
  misc_feature (61)..(62): /note="This region represents a CpG dinucleotide"
  misc_feature (61)..(61): /note="Nucleotide may be methylated to form 5-methylcytosine"
caaatacttatgggaaatgctggattaaacagagttaagaagcatcagacatttccaggacgggctagcacatgccagggctctctaactgacctcattaggattcatctgtttcatggagg

SEQ ID NO: 21070 - DNA, 122 bp, Homo sapiens
  misc_feature (61)..(62): /note="This region represents a CpG dinucleotide"
  misc_feature (61)..(61): /note="Nucleotide may be methylated to form 5-methylcytosine"
caggctcagctcaccaacacctttgaaggtgcaacagcatctcactctgcaggggaagtgcgaaaagtcagatgcagttcacactctcatgccgctagaacccggtagaagttgccagggca

SEQ ID NO: 21071 - DNA, 122 bp, Homo sapiens
  misc_feature (61)..(62): /note="This region represents a CpG dinucleotide"
  misc_feature (61)..(61): /note="Nucleotide may be methylated to form 5-methylcytosine"
gagagccacttggccatgtacctcattggagagccacttggccacgtgcctaattagaagcgcacattctttgatccagcagatccacttctggaaatactggcatattttgtaatagcaaa

SEQ ID NO: 21072 - DNA, 122 bp, Homo sapiens
  misc_feature (61)..(62): /note="This region represents a CpG dinucleotide"
  misc_feature (61)..(61): /note="Nucleotide may be methylated to form 5-methylcytosine"
tggtatgaatgacaggcacattatttctaatcctttttattggttctgtcccaggccttgcgtagtttctttgcatgcatgcaccggtcagtactcagctgaatattaaaggaggttctctg

SEQ ID NO: 21073 - DNA, 122 bp, Homo sapiens
  misc_feature (61)..(62): /note="This region represents a CpG dinucleotide"
  misc_feature (61)..(61): /note="Nucleotide may be methylated to form 5-methylcytosine"
attttatgagacttgatataaggaaaatgggtgaagagaaaatgaaaagtaagggaaagtcgaccagtccaaatgacatgctaaagccccaaactcctgcttcaggggcattgctgctttgt

SEQ ID NO: 21074 - DNA, 122 bp, Homo sapiens
  misc_feature (61)..(62): /note="This region represents a CpG dinucleotide"
  misc_feature (61)..(61): /note="Nucleotide may be methylated to form 5-methylcytosine"
tcaaggtttctaagatttactattcatacaattacaattgtcattaagagttttcgctggcgtaagtggcacaacacctttgcaatgagcaaacatagtacttatgcatgagttcagggtac

SEQ ID NO: 21075 - DNA, 122 bp, Homo sapiens
  misc_feature (61)..(62): /note="This region represents a CpG dinucleotide"
  misc_feature (61)..(61): /note="Nucleotide may be methylated to form 5-methylcytosine"
ttggaactctcactagccactgaaaggaaacagggctccttaagagaaattactgatttccgatcaggtacaggaaaagtataagttgagttgtgacatcttttgatcagaaagcaaggaag

SEQ ID NO: 21076 - DNA, 122 bp, Homo sapiens
  misc_feature (61)..(62): /note="This region represents a CpG dinucleotide"
  misc_feature (61)..(61): /note="Nucleotide may be methylated to form 5-methylcytosine"
tgaaagagccatattcatttgcaagcctgtctcttgccagatattcaaaagcaggtgcaacggggtcagctacctctgagatataaacaaaaggtttcatgtatgagtcagtgtgaccttta

SEQ ID NO: 21077 - DNA, 122 bp, Homo sapiens
  misc_feature (61)..(62): /note="This region represents a CpG dinucleotide"
  misc_feature (61)..(61): /note="Nucleotide may be methylated to form 5-methylcytosine"
aaggaagcatctgccaacccacagtaggtacattaacatcagattattgcctcataatgtcgtttggaggactgaattgatatttgctcaaacatcttgtaaactgtaaagtgctataggaa

SEQ ID NO: 21078 - DNA, 122 bp, Homo sapiens
  misc_feature (61)..(62): /note="This region represents a CpG dinucleotide"
  misc_feature (61)..(61): /note="Nucleotide may be methylated to form 5-methylcytosine"
tcaggcatttacatatatttttctgatgaattacttcttactcattttggtttttcccaccgtaatatgttgcttctggtgaaccagtgactatttaatgaatcagcgagtcaaacaagtac

SEQ ID NO: 21079 - DNA, 122 bp, Homo sapiens
  misc_feature (61)..(62): /note="This region represents a CpG dinucleotide"
  misc_feature (61)..(61): /note="Nucleotide may be methylated to form 5-methylcytosine"
tatgacacacattgcaaaacctagattaagaaacctcagggcagagggcagatcatcacacgtacaagtgtacccaggcacttggccagtacacaaagaggtgcatggcttcagcacttcga

SEQ ID NO: 21080 - DNA, 122 bp, Homo sapiens
  misc_feature (61)..(62): /note="This region represents a CpG dinucleotide"
  misc_feature (61)..(61): /note="Nucleotide may be methylated to form 5-methylcytosine"
gtcctggggctgagatggaacaggtcaggatggatgggacaggacccacagactggatgccgcagggacagacctggtaagtgacttatgtgggagggaggggccaaactgctgtagggggc

SEQ ID NO: 21081 - DNA, 122 bp, Homo sapiens
  misc_feature (61)..(62): /note="This region represents a CpG dinucleotide"
  misc_feature (61)..(61): /note="Nucleotide may be methylated to form 5-methylcytosine"
actacaacagtatctaccaataatcacatacatgaccaaatagctttcacttctagctgccgttaagaagaaagaaaaggatgaaaagaaaaaaaatcctataaaccccagttcttgaaagc

SEQ ID NO: 21082 - DNA, 122 bp, Homo sapiens
  misc_feature (61)..(62): /note="This region represents a CpG dinucleotide"
  misc_feature (61)..(61): /note="Nucleotide may be methylated to form 5-methylcytosine"
actttacaatggctaatttcacaaaggtttgtagcaggtgaattgacataatacaatttccgccagtgctctgaatgtcaacatgaagaaattcaatgaagggtgggtaaacatgtgggagt

SEQ ID NO: 21083 - DNA, 122 bp, Homo sapiens
  misc_feature (61)..(62): /note="This region represents a CpG dinucleotide"
  misc_feature (61)..(61): /note="Nucleotide may be methylated to form 5-methylcytosine"
aataaaactttggctctttaaagtcagctcagctattacaggtctgatttgccgtccttacgccagaattgaagaagagcaaaacatcaaaattccttgagtaaaaagagaagacttggccc

SEQ ID NO: 21084 - DNA, 122 bp, Homo sapiens
  misc_feature (61)..(62): /note="This region represents a CpG dinucleotide"
  misc_feature (61)..(61): /note="Nucleotide may be methylated to form 5-methylcytosine"
caggcacataatccagcttcacaaaagattgctgcacaaatgcctgagcacacagtgttgcgtaagttcaaaagagacaactatagtgcaaatacttgtaaactataaagtgctgttaaccc

SEQ ID NO: 21085 - DNA, 122 bp, Homo sapiens
  misc_feature (61)..(62): /note="This region represents a CpG dinucleotide"
  misc_feature (61)..(61): /note="Nucleotide may be methylated to form 5-methylcytosine"
tttttaggatgtggaatctgagtcaggtcagagaggttaaagatcttgccttaagtcacacggcttagtaagggatggagcccagattagaaacgtggtatattacactttgaagcttatgc

SEQ ID NO: 21086 - DNA, 122 bp, Homo sapiens
  misc_feature (61)..(62): /note="This region represents a CpG dinucleotide"
  misc_feature (61)..(61): /note="Nucleotide may be methylated to form 5-methylcytosine"
tttagataatgcgttacagcttgcacactgttttcttacacactaaagttgtgctgataacgtctctgaaaatcgcataagataggcatctctatccctattataaaaataaggcaaccaag

SEQ ID NO: 21087 - DNA, 122 bp, Homo sapiens
  misc_feature (61)..(62): /note="This region represents a CpG dinucleotide"
  misc_feature (61)..(61): /note="Nucleotide may be methylated to form 5-methylcytosine"
cagaggaatgcctcttcaggcacataaacatttttgcatactccatgttagtcaataaaccgtttcataagggttctttgaggacatctgacttcaaagggaaaaaattcataattcagaca

SEQ ID NO: 21088 - DNA, 122 bp, Homo sapiens
  misc_feature (61)..(62): /note="This region represents a CpG dinucleotide"
  misc_feature (61)..(61): /note="Nucleotide may be methylated to form 5-methylcytosine"
aggtgccgttttccctgccagctgtcccccaagctgtgtacaaagggatggttgatctgtcgctaggaacaaagaaaacaggaagttagggaggaacagggtcattgagaataaaggcagct

SEQ ID NO: 21089 - DNA, 122 bp, Homo sapiens
  misc_feature (61)..(62): /note="This region represents a CpG dinucleotide"
  misc_feature (61)..(61): /note="Nucleotide may be methylated to form 5-methylcytosine"
tatttgcagttcctgtctttgcagttctcctctcttccttgtatgggcacaggtgactctcgcaaacctagatccctgggaaagccaatcaagaaaataaagcacagccttgtcctttttct

SEQ ID NO: 21090 - DNA, 122 bp, Homo sapiens
  misc_feature (61)..(62): /note="This region represents a CpG dinucleotide"
  misc_feature (61)..(61): /note="Nucleotide may be methylated to form 5-methylcytosine"
acaggtgtggcctggcccagcccactgttcaagtgaattgtatttagagagttcattacacgtaaccccttgaatagcctctccagggctctactctccatcatgtgattgagagactgtgg

SEQ ID NO: 21091 - DNA, 122 bp, Homo sapiens
  misc_feature (61)..(62): /note="This region represents a CpG dinucleotide"
  misc_feature (61)..(61): /note="Nucleotide may be methylated to form 5-methylcytosine"
tttgactcatgcgttacagaaggtccagccggtggctcactcttgctttgctgaggtcatcgtgccagaaaaaaagaacagcggcagtggcggcggcttatctggcatgggccacacacctg

SEQ ID NO: 21092 - DNA, 122 bp, Homo sapiens
  misc_feature (61)..(62): /note="This region represents a CpG dinucleotide"
  misc_feature (61)..(61): /note="Nucleotide may be methylated to form 5-methylcytosine"
ctccctacctctgtggcctttgacaatttacttaaccattctgagccttggtttcatcaccgttaagaaagtttagtaaatcctctcccataggttatggtggggcttaaatggagagaagg

SEQ ID NO: 21093 - DNA, 122 bp, Homo sapiens
  misc_feature (61)..(62): /note="This region represents a CpG dinucleotide"
  misc_feature (61)..(61): /note="Nucleotide may be methylated to form 5-methylcytosine"
taccgttatatgctttgtctgccatatcgcatttaaacctcatgtcagttcggtgaagtccgtatagttctctttatgtttttaccattacactactacattcccctggggtggggcgaggg

SEQ ID NO: 21094 - DNA, 122 bp, Homo sapiens
  misc_feature (61)..(62): /note="This region represents a CpG dinucleotide"
  misc_feature (61)..(61): /note="Nucleotide may be methylated to form 5-methylcytosine"
tgtcacctctatcactgggtttttccacacgtattactgctattgttatttcaaaatgttcggggccagaagtttctgccaactcctgtaccaaaaaggctcctgtccttccctagtgacag

SEQ ID NO: 21095 - DNA, 122 bp, Homo sapiens
  misc_feature (61)..(62): /note="This region represents a CpG dinucleotide"
  misc_feature (61)..(61): /note="Nucleotide may be methylated to form 5-methylcytosine"
atttgctggtttaaatattaccaatctaaaaaatatatttaaaaaaaatttcagttaacacgagatttatagagaaagttactaggtcttgaaggcaaggcagttggttcctatgccataga

SEQ ID NO: 21096 - DNA, 122 bp, Homo sapiens
  misc_feature (61)..(62): /note="This region represents a CpG dinucleotide"
  misc_feature (61)..(61): /note="Nucleotide may be methylated to form 5-methylcytosine"
cgtgattcaccctccttggcctcttaaagtgctgggattacaagtgtgagccatcgcgcccggccggtttatttttttaaaaatggctgggcacagtgacttgtggctgtagttctagctac

SEQ ID NO: 21097 - DNA, 122 bp, Homo sapiens
  misc_feature (61)..(62): /note="This region represents a CpG dinucleotide"
  misc_feature (61)..(61): /note="Nucleotide may be methylated to form 5-methylcytosine"
cacttgaagacctgaaggcagtagtcatgaggttaactcctgtgttccacaggactgacacgtaggaggccctgctttctgagaaaagcagcccaggtagacagtcctcagaggcggggatg

SEQ ID NO: 21098 - DNA, 122 bp, Homo sapiens
  misc_feature (61)..(62): /note="This region represents a CpG dinucleotide"
  misc_feature (61)..(61): /note="Nucleotide may be methylated to form 5-methylcytosine"
caaccggagctattgtgaaggtcagaaaacaggagagggaatcttggcaaggaatggagacggagtttgcaaattgcagcttgagtaaatagttatgaatgggactgctattgtgtctccca

SEQ ID NO: 21099 - DNA, 122 bp, Homo sapiens
  misc_feature (61)..(62): /note="This region represents a CpG dinucleotide"
  misc_feature (61)..(61): /note="Nucleotide may be methylated to form 5-methylcytosine"
aatccttgtggctttctttctcaacttcctactggcctcaaacgtcttggggtttgcagacgttagtacggagcaaagaggatggaggcaggagtggcgcggatgggcccatgcccaggcct

SEQ ID NO: 21100 - DNA, 122 bp, Homo sapiens
  misc_feature (61)..(62): /note="This region represents a CpG dinucleotide"
  misc_feature (61)..(61): /note="Nucleotide may be methylated to form 5-methylcytosine"
gcaagactacacctcaaagaaaaaaaaagtgcatggattaaagtttacaggtgaggtccacggacatttttggtgaaaccgaactcacaagctgtgatcattgccaactaagcagtcagaca

SEQ ID NO: 21101 - DNA, 122 bp, Homo sapiens
  misc_feature (61)..(62): /note="This region represents a CpG dinucleotide"
  misc_feature (61)..(61): /note="Nucleotide may be methylated to form 5-methylcytosine"
taagacttacaaaggtcaaggaacttgcctaaagttctacagccagtaactggcaagtcccgccctctttggatttgagcctccagctcttaacctcaaacaagaagactgctggtgcaggt

SEQ ID NO: 21102 - DNA, 122 bp, Homo sapiens
  misc_feature (61)..(62): /note="This region represents a CpG dinucleotide"
  misc_feature (61)..(61): /note="Nucleotide may be methylated to form 5-methylcytosine"
atgtttatttgcacaaaatctctaaagtcctagggccaggagactactggtcattttgtccgtcttcctgcctcctagctaggacactttaagtcataataataatattcctgaagggtttc

SEQ ID NO: 21103 - DNA, 122 bp, Homo sapiens
  misc_feature (61)..(62): /note="This region represents a CpG dinucleotide"
  misc_feature (61)..(61): /note="Nucleotide may be methylated to form 5-methylcytosine"
atcctgcttttcatttcttaataggctatgcttcacttgggtttatctgttctttccttacgattagattaagattgtgcaatcttggctggaatataacataagtgatgtgtgtttttcag

SEQ ID NO: 21104 - DNA, 122 bp, Homo sapiens
  misc_feature (61)..(62): /note="This region represents a CpG dinucleotide"
  misc_feature (61)..(61): /note="Nucleotide may be methylated to form 5-methylcytosine"
gtgtatagcccaaactcttcttgagcaccctacctggtttttgtcccatttttttgcatccggttttgtccagtggaccttagtcacaaggtgtaggcagggctgctgaaccaaggcccaaa

SEQ ID NO: 21105 - DNA, 122 bp, Homo sapiens
  misc_feature (61)..(62): /note="This region represents a CpG dinucleotide"
  misc_feature (61)..(61): /note="Nucleotide may be methylated to form 5-methylcytosine"
tttggtgaccttttatgaccatcaagttcacaatgctggtgggctgccttttaatccctccgcagacaaaggccctaaataaacacagatcccttcctgggaaaaagtccactctggttaaa

SEQ ID NO: 21106 - DNA, 122 bp, Homo sapiens
  misc_feature (61)..(62): /note="This region represents a CpG dinucleotide"
  misc_feature (61)..(61): /note="Nucleotide may be methylated to form 5-methylcytosine"
ttactcaaacaaacctggtatgtagagcaggcactgccagagcctcatggcctttttgtacgggagtggtgtacagttcagcagataggcacagcaaactcctcttctgccattcagatcag

SEQ ID NO: 21107 - DNA, 122 bp, Homo sapiens
  misc_feature (61)..(62): /note="This region represents a CpG dinucleotide"
  misc_feature (61)..(61): /note="Nucleotide may be methylated to form 5-methylcytosine"
aggcatgagccaccgcgcccagtctatttcctgttttcttaatgtatgagttaataagtacgttacagccacatttcttaacgcttttccgggatttcttttgcagagactgaattcccttc

SEQ ID NO: 21108 - DNA, 122 bp, Homo sapiens
  misc_feature (61)..(62): /note="This region represents a CpG dinucleotide"
  misc_feature (61)..(61): /note="Nucleotide may be methylated to form 5-methylcytosine"
cacccaggtgtcccttcatggagatgaactcagtgacttcccacaagaagccactggctacggctctcatcgttcttgttctttggatgaagaggctgagtcactggccatgtggctgggat

SEQ ID NO: 21109 - DNA, 122 bp, Homo sapiens
  misc_feature (61)..(62): /note="This region represents a CpG dinucleotide"
  misc_feature (61)..(61): /note="Nucleotide may be methylated to form 5-methylcytosine"
ggaggctctgtgagaccccaactaatcccaaaggagggaccaagtccaggacttaggggacgaagttctggccaggtcctaccatgactctcacagtgcctgtttctcactcatcactctag

SEQ ID NO: 21110 - DNA, 122 bp, Homo sapiens
  misc_feature (61)..(62): /note="This region represents a CpG dinucleotide"
  misc_feature (61)..(61): /note="Nucleotide may be methylated to form 5-methylcytosine"
caagagtctccagaggcaaggaggcatggttagaaaacagcccattcagcagacactggacggtacagatcctatccctggggtgttcataaccaggacagatcagattctaggccaccaat

SEQ ID NO: 21111 - DNA, 122 bp, Homo sapiens
  misc_feature (61)..(62): /note="This region represents a CpG dinucleotide"
  misc_feature (61)..(61): /note="Nucleotide may be methylated to form 5-methylcytosine"
ttaagtaatctactcaaagtgccactgttaataagcatggggccacaatttaaactcaggcgtcatgatttcagagtccactgaaatcataatgaaaggttttcagatgataaaaaacccac

SEQ ID NO: 21112 - DNA, 122 bp, Homo sapiens
  misc_feature (61)..(62): /note="This region represents a CpG dinucleotide"
  misc_feature (61)..(61): /note="Nucleotide may be methylated to form 5-methylcytosine"
agatgtaaaccgtttacccacccctctctctggacctagcccagatcagagatcatagatcgtagatagttgctgcattcaacaactatctcatttgcatctattatcattctataacatcc

SEQ ID NO: 21113 - DNA, 122 bp, Homo sapiens
  misc_feature (61)..(62): /note="This region represents a CpG dinucleotide"
  misc_feature (61)..(61): /note="Nucleotide may be methylated to form 5-methylcytosine"
gaggggagcaaatgaatataccccggcaccctagagaccaaagccctagccagcatctgccgcccattggcccgctctctgggaggccttgcaaacagtccatgcccagaagctggggcagg

SEQ ID NO: 21114 - DNA, 122 bp, Homo sapiens
  misc_feature (61)..(62): /note="This region represents a CpG dinucleotide"
  misc_feature (61)..(61): /note="Nucleotide may be methylated to form 5-methylcytosine"
gtactgaccttaaatgcttccttaaaacatgactgtgaggattaactaagataaggactacgaatgcattttgtcacaaatgaattcatttttgtggttgctgctcacgctgatggttctct

SEQ ID NO: 21115 - DNA, 122 bp, Homo sapiens
  misc_feature (61)..(62): /note="This region represents a CpG dinucleotide"
  misc_feature (61)..(61): /note="Nucleotide may be methylated to form 5-methylcytosine"
cagcttgagacagatggaaacaagagaagaaacagtggagtggtaacggaagtgttgacacgactccagatattaggcaagaaggctgtgatcaagtaacagagaattaatttcagttgtgt

SEQ ID NO: 21116 - DNA, 122 bp, Homo sapiens
  misc_feature (61)..(62): /note="This region represents a CpG dinucleotide"
  misc_feature (61)..(61): /note="Nucleotide may be methylated to form 5-methylcytosine"
attaatttaatacttgctttctgtggggactctacacgacttggtcaaaagtaacttagtcgataagacaatttgaaaacaaacattcccagtcactggctttccaggtgttgatttcacaa

SEQ ID NO: 21117 - DNA, 122 bp, Homo sapiens
  misc_feature (61)..(62): /note="This region represents a CpG dinucleotide"
  misc_feature (61)..(61): /note="Nucleotide may be methylated to form 5-methylcytosine"
gtctcccttgctttgtaaacatgtttaaccatgttataaaagctgttctaaaccgtcagacgtgggatctaaacaacaacaaatgttctgcagttggctgatctggaaagtgagcaagccac

SEQ ID NO: 21118 - DNA, 122 bp, Homo sapiens
  misc_feature (61)..(62): /note="This region represents a CpG dinucleotide"
  misc_feature (61)..(61): /note="Nucleotide may be methylated to form 5-methylcytosine"
ccacactgttctatcattatccaggccagtattttctcactcttgaatactctcagtcagcgcccattgtaatccatttataattaaatagtaagaattagttcctttaaaatctaaaggta

SEQ ID NO: 21119 - DNA, 122 bp, Homo sapiens
  misc_feature (61)..(62): /note="This region represents a CpG dinucleotide"
  misc_feature (61)..(61): /note="Nucleotide may be methylated to form 5-methylcytosine"
gacgtgaatgtagtagggactgtgcggatgctgcaggccttcctgccagacatgaagaggcgcggttcgggacgcgtgttggtgaccgggagcgtgggaggattgatgggtgagtggtaggg

SEQ ID NO: 21120 - DNA, 122 bp, Homo sapiens
  misc_feature (61)..(62): /note="This region represents a CpG dinucleotide"
  misc_feature (61)..(61): /note="Nucleotide may be methylated to form 5-methylcytosine"
cctgtggtcgggaggccccaccagcaacgcctggagcccaggcgggcgtttctgagaaatcgatggtctcaggtggtggctggtaataatcatgttgataataatcattgtcccctagtccg

SEQ ID NO: 21121 - DNA, 122 bp, Homo sapiens
  misc_feature (61)..(62): /note="This region represents a CpG dinucleotide"
  misc_feature (61)..(61): /note="Nucleotide may be methylated to form 5-methylcytosine"
aagcacaaaggtggttcagccagttgtttaccactcaggtattccttattcagcagttttcgtacaaaaatgctaccttttaatttcctaatgctctgccctcccaaaaggtaataagaaat

SEQ ID NO: 21122 - DNA, 122 bp, Homo sapiens
  misc_feature (61)..(62): /note="This region represents a CpG dinucleotide"
  misc_feature (61)..(61): /note="Nucleotide may be methylated to form 5-methylcytosine"
aggccttgcacttggtactacagcaaagataagacagtccccaacctcagagagctcatacggtgaatcagtcacccaagaaccactccaggctatgcccctgagatgctcctaaactgatg

SEQ ID NO: 21123 - DNA, 122 bp, Homo sapiens
  misc_feature (61)..(62): /note="This region represents a CpG dinucleotide"
  misc_feature (61)..(61): /note="Nucleotide may be methylated to form 5-methylcytosine"
gagagtataatttatgtatgctggtgatcaattcaaacgaacacatcaattcctacaatacgccctatattggactatattggacactatattggacactaggaatataaagatgaataaat

SEQ ID NO: 21124 - DNA, 122 bp, Homo sapiens
  misc_feature (61)..(62): /note="This region represents a CpG dinucleotide"
  misc_feature (61)..(61): /note="Nucleotide may be methylated to form 5-methylcytosine"
gggacgtggcttctggagtgtgacgaataagtgcaggtgccatcaggcgtcacccggccacgggaaaggtccttgagacatggcaggagaacataagagtaatattcctgcccgtgtcccag

SEQ ID NO: 21125 - DNA, 122 bp, Homo sapiens
  misc_feature (61)..(62): /note="This region represents a CpG dinucleotide"
  misc_feature (61)..(61): /note="Nucleotide may be methylated to form 5-methylcytosine"
aggccgctccgcaccaggcatataagtactcagggaatgtgaattccttgtcccctcttccgctttgagttaagaagatgcctctcttgcctgctgctgacagcgtgtggggtggcattccc

SEQ ID NO: 21126 - DNA, 122 bp, Homo sapiens
  misc_feature (61)..(62): /note="This region represents a CpG dinucleotide"
  misc_feature (61)..(61): /note="Nucleotide may be methylated to form 5-methylcytosine"
gtatttgagactttagtcattgcctgttctgagccatcacattacagagacaggcctaggcgccacctagcccttcattagtaagagtgcacttcctagagattctaggttcactgcagtga

SEQ ID NO: 21127 - DNA, 122 bp, Homo sapiens
  misc_feature (61)..(62): /note="This region represents a CpG dinucleotide"
  misc_feature (61)..(61): /note="Nucleotide may be methylated to form 5-methylcytosine"
gtatataagtgacagagccaggatccaaacacatacataagtgtgtcttgaccatgtgaacgtgaccacaccattggtggttgtactctcagtacagcataatcatcatacttctgaatgtt

SEQ ID NO: 21128 - DNA, 122 bp, Homo sapiens
  misc_feature (61)..(62): /note="This region represents a CpG dinucleotide"
  misc_feature (61)..(61): /note="Nucleotide may be methylated to form 5-methylcytosine"
ggctgggatgatggggcagaggccacatgggtttggctgggatgatgggcagaggccacacgggttcggctgggacgataggcagaagccacatgggttcggctgggacgataggcagaggc

SEQ ID NO: 21129 - DNA, 122 bp, Homo sapiens
  misc_feature (61)..(62): /note="This region represents a CpG dinucleotide"
  misc_feature (61)..(61): /note="Nucleotide may be methylated to form 5-methylcytosine"
gaacacaaaatgggtgggcaagggaaggattcttaactgtttcttttttccacaatgatacgactcaggtaaaattcaatgttgtctggatggagcctgaacaacattttctagaagcttct

SEQ ID NO: 21130 - DNA, 122 bp, Homo sapiens
  misc_feature (61)..(62): /note="This region represents a CpG dinucleotide"
  misc_feature (61)..(61): /note="Nucleotide may be methylated to form 5-methylcytosine"
agttaaaagacctgttctacagtaagagacaaagaattgaagagacttgctgaaggtcaccgaagactgaggtttttatcacttaagaggccagaatttataagatttgaacatggatgcct

SEQ ID NO: 21131 - DNA, 122 bp, Homo sapiens
  misc_feature (61)..(62): /note="This region represents a CpG dinucleotide"
  misc_feature (61)..(61): /note="Nucleotide may be methylated to form 5-methylcytosine"
ttacctctcctcagcggcagcagggcagagtgctgaacccaggaccccacagatcctccccgctcctgtctcccggtgacaagggtcctggaacggggcgtctctgactccctgctccagga

SEQ ID NO: 21132 - DNA, 122 bp, Homo sapiens
  misc_feature (61)..(62): /note="This region represents a CpG dinucleotide"
  misc_feature (61)..(61): /note="Nucleotide may be methylated to form 5-methylcytosine"
cccaggactgaagtttgttaagtgagtgtaatacaaagacaggtcgagcaacaaggcaagcgttttctaactgcagatcatagcttttgtatgccttctgcctggaatgttttctcctagct

SEQ ID NO: 21133 - DNA, 122 bp, Homo sapiens
  misc_feature (61)..(62): /note="This region represents a CpG dinucleotide"
  misc_feature (61)..(61): /note="Nucleotide may be methylated to form 5-methylcytosine"
taaaaattcttactacagcttggcaatccgatagctttgactttcttagttcccctatttcgacttttcttcctgagaagcctactgcctctttgacataaattcttcctcactgacccaag

SEQ ID NO: 21134 - DNA, 122 bp, Homo sapiens
  misc_feature (61)..(62): /note="This region represents a CpG dinucleotide"
  misc_feature (61)..(61): /note="Nucleotide may be methylated to form 5-methylcytosine"
aaacaagaagagattattccaaagactgtgactatcagaactgccaaaaacatgtccaaacgtgggtaacatgtttgataccccttgttatcaaatgctaatgttccagtagagactgactt

SEQ ID NO: 21135 - DNA, 122 bp, Homo sapiens
  misc_feature (61)..(62): /note="This region represents a CpG dinucleotide"
  misc_feature (61)..(61): /note="Nucleotide may be methylated to form 5-methylcytosine"
tgtggcaaaaccttcgtcattttccaaaaccactcaccacgtccaggaacttggtgcatgcgtgaaatgatatggtcacagggctcttcattgcagcatagtttgtaacgtcagatgggaaa

SEQ ID NO: 21136 - DNA, 122 bp, Homo sapiens
  misc_feature (61)..(62): /note="This region represents a CpG dinucleotide"
  misc_feature (61)..(61): /note="Nucleotide may be methylated to form 5-methylcytosine"
cgatgtgagtaatggtttcagtttcggtgggcagccagaagtctctttgggaaaatatgtcgttaaatattctttggtttgttttttatgatcggctttgctttctgcccccttcctctgtc

SEQ ID NO: 21137 - DNA, 122 bp, Homo sapiens
  misc_feature (61)..(62): /note="This region represents a CpG dinucleotide"
  misc_feature (61)..(61): /note="Nucleotide may be methylated to form 5-methylcytosine"
tttccagccccaagggaagacacccttatggcctggtcttttaaggaaaaggggccaggtcgctgggtggcagaaacttgggcttgggagtcatcaccacttagcagctgcatgagcttatc

SEQ ID NO: 21138 - DNA, 122 bp, Homo sapiens
  misc_feature (61)..(62): /note="This region represents a CpG dinucleotide"
  misc_feature (61)..(61): /note="Nucleotide may be methylated to form 5-methylcytosine"
gctgtgggttcttccctgtaaaacagggccatgaggattggcttcacagagctgttgtaacgaggactccatcaggtgagatgtgggaagcaccagctcagtgcctttctggtgccaagagc

SEQ ID NO: 21139 - DNA, 122 bp, Homo sapiens
  misc_feature (61)..(62): /note="This region represents a CpG dinucleotide"
  misc_feature (61)..(61): /note="Nucleotide may be methylated to form 5-methylcytosine"
ctgtggtcaaagaaaatactccactcctcctgaaaagctaaaagaattccaatgtactggcgctgactcactaccggatcaccactgacagctgagtctacttgctttactgcctctcccca

SEQ ID NO: 21140 - DNA, 122 bp, Homo sapiens
  misc_feature (61)..(62): /note="This region represents a CpG dinucleotide"
  misc_feature (61)..(61): /note="Nucleotide may be methylated to form 5-methylcytosine"
tgcaaaaagatgtctttaccagctagatgtgctgcgaacaatcacttgtcttggaagcctcgcagcaggggcctgctgggggcctgtccatgcttcatccctctggagccttagaccaactt

SEQ ID NO: 21141 - DNA, 122 bp, Homo sapiens
  misc_feature (61)..(62): /note="This region represents a CpG dinucleotide"
  misc_feature (61)..(61): /note="Nucleotide may be methylated to form 5-methylcytosine"
ctggaaaacacaaacccgaagggaagtttgggctgtaactctggtggcagggtgaccaagcgcagctgcttgaggaagccctgctgtgcctcaacaggatgtaaactcattgtgagcaacac

SEQ ID NO: 21142 - DNA, 122 bp, Homo sapiens
  misc_feature (61)..(62): /note="This region represents a CpG dinucleotide"
  misc_feature (61)..(61): /note="Nucleotide may be methylated to form 5-methylcytosine"
ggcctctaccatctgaggaatgtgctgccatttgtgttacccaagctccagccagctggacgtctggagccaccacatcctttcagatttaaacacaacttcccttgatgggaaaccggcct

SEQ ID NO: 21143 - DNA, 122 bp, Homo sapiens
  misc_feature (61)..(62): /note="This region represents a CpG dinucleotide"
  misc_feature (61)..(61): /note="Nucleotide may be methylated to form 5-methylcytosine"
gatgtccgcatcctgaaggagagctggctgcgcgggctgtgagtgagacctccctgaccccgcccttttttgttcccctccaggatgctgccggactggaagagctccttgatcctcatggc

SEQ ID NO: 21144 - DNA, 122 bp, Homo sapiens
  misc_feature (61)..(62): /note="This region represents a CpG dinucleotide"
  misc_feature (61)..(61): /note="Nucleotide may be methylated to form 5-methylcytosine"
tgacacacaacacctcctcccagatattactggcaacagctaattgtgaccccatctaaacgcagtggaaatgaggactgggaattgttgctcctgatgggcaggtacttcctagcaacagc

SEQ ID NO: 21145 - DNA, 122 bp, Homo sapiens
  misc_feature (61)..(62): /note="This region represents a CpG dinucleotide"
  misc_feature (61)..(61): /note="Nucleotide may be methylated to form 5-methylcytosine"
agaacataggccttccagtaatgccactgatgatgactgcctgagtacagcaacgctgaacggtgtcacttctcaggtggaccagtgacgaaccctagaatcaccaagaatctcaaatcagt

SEQ ID NO: 21146 - DNA, 122 bp, Homo sapiens
  misc_feature (61)..(62): /note="This region represents a CpG dinucleotide"
  misc_feature (61)..(61): /note="Nucleotide may be methylated to form 5-methylcytosine"
cagctaccatctaaccaggcaactgagggaaaagcacaaggacttgtcattactgagtggcggttgcttgaactgaagactgggcaaggctgaaaacctggggcttgatagagcctgtaggg

SEQ ID NO: 21147 - DNA, 122 bp, Homo sapiens
  misc_feature (61)..(62): /note="This region represents a CpG dinucleotide"
  misc_feature (61)..(61): /note="Nucleotide may be methylated to form 5-methylcytosine"
ctacagagcagtacagaggctctcgctgaaaccagtcccaggctccacagagtcagatcacggcttcacaccagtcgttctggtcacttaggcgttcgcgtgagcgctcaaccccttaccgc

SEQ ID NO: 21148 - DNA, 122 bp, Homo sapiens
  misc_feature (61)..(62): /note="This region represents a CpG dinucleotide"
  misc_feature (61)..(61): /note="Nucleotide may be methylated to form 5-methylcytosine"
ttgttacaggtgtgatcacaccatcatgatgtgattttgtaacaggatgattttgtaacacgatgacattttgtaacagacacagagccagggacaataccactgagctgctgaagcaaccc

SEQ ID NO: 21149 - DNA, 122 bp, Homo sapiens
  misc_feature (61)..(62): /note="This region represents a CpG dinucleotide"
  misc_feature (61)..(61): /note="Nucleotide may be methylated to form 5-methylcytosine"
tactgacccctgtgcaagaagatagctcagaggatgcccacagctggtgccaacattcttcggaggctatggaacacactgtctggggaaggccctataatactttctaggttctaatccta

SEQ ID NO: 21150 - DNA, 122 bp, Homo sapiens
  misc_feature (61)..(62): /note="This region represents a CpG dinucleotide"
  misc_feature (61)..(61): /note="Nucleotide may be methylated to form 5-methylcytosine"
atctgaggccatgtggccactggatccttgctctcacctgacagactagaggggttatttcgtgtgctccctcaccaaagcctgtgaggtgcctgcaggtgcaaggggcagcatgcctccca

SEQ ID NO: 21151 - DNA, 122 bp, Homo sapiens
  misc_feature (61)..(62): /note="This region represents a CpG dinucleotide"
  misc_feature (61)..(61): /note="Nucleotide may be methylated to form 5-methylcytosine"
aggtttaattcctcaattcctcagtcactctagccacatttcaagtactccatagtcatacgtggctagtagctatcttatctgtggagtcctaattaggaacaggaagtcacgctggcagg

SEQ ID NO: 21152 - DNA, 122 bp, Homo sapiens
  misc_feature (61)..(62): /note="This region represents a CpG dinucleotide"
  misc_feature (61)..(61): /note="Nucleotide may be methylated to form 5-methylcytosine"
caggtggccatccatataggggaatagactagcttttttttaaaaaaaatatcctttcaacgaggttgtactgcaaactggaaaactggtttgaatatattctaaggttaaaacataaacat

SEQ ID NO: 21153 - DNA, 122 bp, Homo sapiens
  misc_feature (61)..(62): /note="This region represents a CpG dinucleotide"
  misc_feature (61)..(61): /note="Nucleotide may be methylated to form 5-methylcytosine"
ttccttttttgagcactgccaatcacagtcccatttcacatatgcaattgtgctcagtgtcgtattctaattgtctaatacatttgaagtaaacacaatccaatatacttctgatttaatat

SEQ ID NO: 21154 - DNA, 122 bp, Homo sapiens
  misc_feature (61)..(62): /note="This region represents a CpG dinucleotide"
  misc_feature (61)..(61): /note="Nucleotide may be methylated to form 5-methylcytosine"
ggcaggcttgtcccagagctaggctgtgatgcccagaacctaccgggcatctgcttggctcggctgtaccaggtgggccacgtcattgagctggacattccggcgtatgagatccacagccc

SEQ ID NO: 21155 - DNA, 122 bp, Homo sapiens
  misc_feature (61)..(62): /note="This region represents a CpG dinucleotide"
  misc_feature (61)..(61): /note="Nucleotide may be methylated to form 5-methylcytosine"
gatgccactcacgccatcccagacatgactgcccgtctccctgcctagcacccaccatcccggaaacagggggccccagaggtacggccccgccccacccgcacacctcccatgttgcatct

SEQ ID NO: 21156 - DNA, 122 bp, Homo sapiens
  misc_feature (61)..(62): /note="This region represents a CpG dinucleotide"
  misc_feature (61)..(61): /note="Nucleotide may be methylated to form 5-methylcytosine"
acagagtctgtatgtatctgtgccatgccagttcacagcaccccattgtaactgtatttgcgtgtctgtccccgttactccacccccatgtccctatgcccatgaggccccagagggccagg

SEQ ID NO: 21157 - DNA, 122 bp, Homo sapiens
  misc_feature (61)..(62): /note="This region represents a CpG dinucleotide"
  misc_feature (61)..(61): /note="Nucleotide may be methylated to form 5-methylcytosine"
gatggattgagctcaagaatctcaaagtcacagtgagctctgattgtgcactctagcctgcgtgacagaataagatcctgtctctaaaaacaaaacaaaacaaacaaagctataaaatactg

SEQ ID NO: 21158 - DNA, 122 bp, Homo sapiens
  misc_feature (61)..(62): /note="This region represents a CpG dinucleotide"
  misc_feature (61)..(61): /note="Nucleotide may be methylated to form 5-methylcytosine"
ggaggagtaggaggtgcagtagggccgtcttcaggtggtagctgctgagcccgctgggaccggtcaggcggctctgcttggagagcaggaaggatgctatctgcaggcagctgaggtggcag

SEQ ID NO: 21159 - DNA, 122 bp, Homo sapiens
  misc_feature (61)..(62): /note="This region represents a CpG dinucleotide"
  misc_feature (61)..(61): /note="Nucleotide may be methylated to form 5-methylcytosine"
tccctgttacgcaatcttagccccaggtggaagcctttggaatggcacctttataggaaacgtattttattttatttttgttttgtttttaagagtgatacctgcttgagcatgcttgtatt

SEQ ID NO: 21160 - DNA, 122 bp, Homo sapiens
  misc_feature (61)..(62): /note="This region represents a CpG dinucleotide"
  misc_feature (61)..(61): /note="Nucleotide may be methylated to form 5-methylcytosine"
ctttaggaaacctggcagaaacctttctactctggccaggcaaggggagggagggaagagcgtcagtactacagccaggccatctggtgcaatgctgtgactcattctcttcagagccatca

SEQ ID NO: 21161 - DNA, 122 bp, Homo sapiens
  misc_feature (61)..(62): /note="This region represents a CpG dinucleotide"
  misc_feature (61)..(61): /note="Nucleotide may be methylated to form 5-methylcytosine"
catacaagtcactctggttagagtaagcaaggaattagatatctacaaaatatttgaaagcgttgaggaagcagtttctagactgagcctccagagatatctcccagaattataccatagaa

SEQ ID NO: 21162 - DNA, 122 bp, Homo sapiens
  misc_feature (61)..(62): /note="This region represents a CpG dinucleotide"
  misc_feature (61)..(61): /note="Nucleotide may be methylated to form 5-methylcytosine"
gagtcaatgcacatgatcacacgtcatttgccatgccagagttgtctctcagagagttcacgatatggacggtggtggcctaacattcaccagcatctagactgctaccaagaactgaaaca

SEQ ID NO: 21163 - DNA, 122 bp, Homo sapiens
  misc_feature (61)..(62): /note="This region represents a CpG dinucleotide"
  misc_feature (61)..(61): /note="Nucleotide may be methylated to form 5-methylcytosine"
tccattctgagggctatgacttataacccagaggtgctgaacagatgcttgtaggaggaacgaatggatgtttaaaaaaaaatgagctgtttcacacgttcatctatgcattctttcaatat

SEQ ID NO: 21164 - DNA, 122 bp, Homo sapiens
  misc_feature (61)..(62): /note="This region represents a CpG dinucleotide"
  misc_feature (61)..(61): /note="Nucleotide may be methylated to form 5-methylcytosine"
ttatggaaatgcgatctctgtgttacagctcttccaactttgtaaaaaagagatgccaaacgttttatttgacattccaaattttatatgttggcaactggttcattttcttttaaacactt

SEQ ID NO: 21165 - DNA, 122 bp, Homo sapiens
  misc_feature (61)..(62): /note="This region represents a CpG dinucleotide"
  misc_feature (61)..(61): /note="Nucleotide may be methylated to form 5-methylcytosine"
cataagtaagatccagcgcagagaatacccgagggtgaaccgtgatgagaagtctcagagcgcactgcgtaattaccacgtgtagaaagcaaaacgttgacaagacacggccgttagcaaaa

SEQ ID NO: 21166 - DNA, 122 bp, Homo sapiens
  misc_feature (61)..(62): /note="This region represents a CpG dinucleotide"
  misc_feature (61)..(61): /note="Nucleotide may be methylated to form 5-methylcytosine"
ggttatgtcttcataacttatgctatatgtgtcttcataagcttatgttaaataagctaacgtaagtaaaagcatttgttctgagcctgctaggcagtggatactcaatgccttgtgccttc

SEQ ID NO: 21167 - DNA, 122 bp, Homo sapiens
  misc_feature (61)..(62): /note="This region represents a CpG dinucleotide"
  misc_feature (61)..(61): /note="Nucleotide may be methylated to form 5-methylcytosine"
ttagctgaagaggaagggctggaaagcgagaggctcagagatctggcagaacaactctggcgagtcaggaagacctaatcagaattaaacgtgtagccaattcaagagagtttgtaagcgag

SEQ ID NO: 21168 - DNA, 122 bp, Homo sapiens
  misc_feature (61)..(62): /note="This region represents a CpG dinucleotide"
  misc_feature (61)..(61): /note="Nucleotide may be methylated to form 5-methylcytosine"
gaaagccccttgagtttaccttatcattctggtatgcagtcacagcgatgaattcagtttcggggaacaagtatgtccgaaatgtactataagggagtttcaagatgtcattggctcttaca

SEQ ID NO: 21169 - DNA, 122 bp, Homo sapiens
  misc_feature (61)..(62): /note="This region represents a CpG dinucleotide"
  misc_feature (61)..(61): /note="Nucleotide may be methylated to form 5-methylcytosine"
gtgggggtggggtgtggaccgaggctggctggagctggagcagtgtcctcagccactggccgggaaggctttgttagactaagcgtggcctgaggatgcctcagtgccaagtcacaccatga

SEQ ID NO: 21170 - DNA, 122 bp, Homo sapiens
  misc_feature (61)..(62): /note="This region represents a CpG dinucleotide"
  misc_feature (61)..(61): /note="Nucleotide may be methylated to form 5-methylcytosine"
atatactcttttgatctttcaggacttgtgtctcatactctaatgactcttcaaggatcacgttttgaacacacaaacacaaatctctgaacgtacaggaagaaagaggggaagatatcaca

SEQ ID NO: 21171 - DNA, 122 bp, Homo sapiens
  misc_feature (61)..(62): /note="This region represents a CpG dinucleotide"
  misc_feature (61)..(61): /note="Nucleotide may be methylated to form 5-methylcytosine"
taattcagagaattattgccttctaatatactgccctgtgtgggggcgtctttgaaagtccgcaaagtcactgcaattctaataggccactcatgtgacaagacctgctcccacatcggtaa

SEQ ID NO: 21172 - DNA, 122 bp, Homo sapiens
  misc_feature (61)..(62): /note="This region represents a CpG dinucleotide"
  misc_feature (61)..(61): /note="Nucleotide may be methylated to form 5-methylcytosine"
aacttaaaacccagaaaccatcccgaggtgagaagggttccagccaaaagtttccaactgcgctcggtgacaaataagatggacaggttatggccaccataattcatttggcaattcctcag

SEQ ID NO: 21173 - DNA, 122 bp, Homo sapiens
  misc_feature (61)..(62): /note="This region represents a CpG dinucleotide"
  misc_feature (61)..(61): /note="Nucleotide may be methylated to form 5-methylcytosine"
cttgccatttctgattaattgccttggatatgcttttaaatcctcccactgaacctgaagcgtactgtcccaaataacgctttttgaagagaaaacttttggaatgcccttcatttctttga

SEQ ID NO: 21174 - DNA, 122 bp, Homo sapiens
  misc_feature (61)..(62): /note="This region represents a CpG dinucleotide"
  misc_feature (61)..(61): /note="Nucleotide may be methylated to form 5-methylcytosine"
gctttctattgtgctattctagcttcatcacaaatgatgtatcatacctgggaatgtgcccggtgaactataaggtattacgtaaatagagaattaggagctgtgccattaataataatgtc

SEQ ID NO: 21175 - DNA, 122 bp, Homo sapiens
  misc_feature (61)..(62): /note="This region represents a CpG dinucleotide"
  misc_feature (61)..(61): /note="Nucleotide may be methylated to form 5-methylcytosine"
gtgcagctggctaggttgtacactgcacaactccaggaggtgcattcacataaactacagcgtgaggagtgccctggcattactcaaggagcaacctacacaattgtacagtggagtactgt

SEQ ID NO: 21176 - DNA, 122 bp, Homo sapiens
  misc_feature (61)..(62): /note="This region represents a CpG dinucleotide"
  misc_feature (61)..(61): /note="Nucleotide may be methylated to form 5-methylcytosine"
cttgatttacagtctagtgaggatttagtcaagttaacaggcaataccttgtaagtgctacgatgtggggcgtgcacagaggactgagggaacacataagattcacatgtcataggttccag

SEQ ID NO: 21177 - DNA, 122 bp, Homo sapiens
  misc_feature (61)..(62): /note="This region represents a CpG dinucleotide"
  misc_feature (61)..(61): /note="Nucleotide may be methylated to form 5-methylcytosine"
aaaacatgcattataacattttggccatacgtaaggtgaatcaataactgatattagatccgtttttaaagtaatggtgcatttcaaagggaaagagaagccccaaatgccatggtcaggtg

SEQ ID NO: 21178 - DNA, 122 bp, Homo sapiens
  misc_feature (61)..(62): /note="This region represents a CpG dinucleotide"
  misc_feature (61)..(61): /note="Nucleotide may be methylated to form 5-methylcytosine"
gcctgggcaacaagagcaaaactctgtctcacacacacacaaaaatagctgggcctgtggcgcgagcctgtaatcccagctactcaggaagctgaggcaggagaatcgtttcagcccgggag

SEQ ID NO: 21179 - DNA, 122 bp, Homo sapiens
  misc_feature (61)..(62): /note="This region represents a CpG dinucleotide"
  misc_feature (61)..(61): /note="Nucleotide may be methylated to form 5-methylcytosine"
gagataacaaaccctacttcctcagattgtatctcagtgtaataatactcaggtaatcgacgtaagagaaacccccaaaactcagttgcttaacccaatgtacaggtttgatttttgcccca

SEQ ID NO: 21180 - DNA, 122 bp, Homo sapiens
  misc_feature (61)..(62): /note="This region represents a CpG dinucleotide"
  misc_feature (61)..(61): /note="Nucleotide may be methylated to form 5-methylcytosine"
ttctatatctgcacttacaaccagcaaacacatgatgcattggagcaagtatataaatcacgaggggaaattccaagagtagaattttgatgaatcagatccagttatttattgtattcata

SEQ ID NO: 21181 - DNA, 122 bp, Homo sapiens
  misc_feature (61)..(62): /note="This region represents a CpG dinucleotide"
  misc_feature (61)..(61): /note="Nucleotide may be methylated to form 5-methylcytosine"
agatacagtgaggctctggaatcagactactggactccaaactcttgctgactgtgtgatcgtggataagttaggtgacttcgctggcctcttcgtccctttataaaacaggaataatgctt

SEQ ID NO: 21182 - DNA, 122 bp, Homo sapiens
  misc_feature (61)..(62): /note="This region represents a CpG dinucleotide"
  misc_feature (61)..(61): /note="Nucleotide may be methylated to form 5-methylcytosine"
aaatatatttgctgtatccaaaagtaaatacgttctgtcttgcttcctcatcttcatgcacgttactttactgtacctggtattcctttcttctttacttctatccaattcttcacctagcc

SEQ ID NO: 21183 - DNA, 122 bp, Homo sapiens
  misc_feature (61)..(62): /note="This region represents a CpG dinucleotide"
  misc_feature (61)..(61): /note="Nucleotide may be methylated to form 5-methylcytosine"
tgcccttggacagataagaaaactgcagccccaggcacagaggcacaagctgagaggtgacgtcaggactgaactgtgagcctgggagtccaaatctaggctcacccagtctttctggctcc

SEQ ID NO: 21184 - DNA, 122 bp, Homo sapiens
  misc_feature (61)..(62): /note="This region represents a CpG dinucleotide"
  misc_feature (61)..(61): /note="Nucleotide may be methylated to form 5-methylcytosine"
ttccttatagcaatgtgagaatggcctaatacatcatctcatcacatcttatcagtggcacgtgatattaaaatgtcttattactggtgatattaactttgattatgtagttaatgaatgtc

SEQ ID NO: 21185 - DNA, 122 bp, Homo sapiens
  misc_feature (61)..(62): /note="This region represents a CpG dinucleotide"
  misc_feature (61)..(61): /note="Nucleotide may be methylated to form 5-methylcytosine"
atttgtactcccacaagcaagataagagactgccgttttcccctacagactcataaacaccgtgtgtgggcaagtttttacatatttctaatctggtagaagaaaaatggtatctcagcata

SEQ ID NO: 21186 - DNA, 122 bp, Homo sapiens
  misc_feature (61)..(62): /note="This region represents a CpG dinucleotide"
  misc_feature (61)..(61): /note="Nucleotide may be methylated to form 5-methylcytosine"
ctgtttaggagttgcagcattggtgaaattcggctgttttccaggatgttgtggtcatggcggtgtgacccagttcaaatgttaaagacaagttcctgttttgcaaggtttcaggtcacgca

SEQ ID NO: 21187 - DNA, 122 bp, Homo sapiens
  misc_feature (61)..(62): /note="This region represents a CpG dinucleotide"
  misc_feature (61)..(61): /note="Nucleotide may be methylated to form 5-methylcytosine"
acaatacagatgactcacatatggctcattcaaagccactggcttgtacatggcatttatcgttaatctagccgtgcccccagcatcataaaaagaccccatggaaactcatccatcagatc

SEQ ID NO: 21188 - DNA, 122 bp, Homo sapiens
  misc_feature (61)..(62): /note="This region represents a CpG dinucleotide"
  misc_feature (61)..(61): /note="Nucleotide may be methylated to form 5-methylcytosine"
gcccttggagatagatgaccaatagtgtagaaaacataagccttcataacaggaaggcagcgactgctctctgggtgtttacgggatctctctgtgttagattagaagataatatttctcca

SEQ ID NO: 21189 - DNA, 122 bp, Homo sapiens
  misc_feature (61)..(62): /note="This region represents a CpG dinucleotide"
  misc_feature (61)..(61): /note="Nucleotide may be methylated to form 5-methylcytosine"
aaagggctggtggcagggatcaggggacatgactggaagcaaagaagtcagttaggatgccgtggtgttcatctacacaatggatgacagtgacctgagttaaggaaaggaaagtggagagg

SEQ ID NO: 21190 - DNA, 122 bp, Homo sapiens
  misc_feature (61)..(62): /note="This region represents a CpG dinucleotide"
  misc_feature (61)..(61): /note="Nucleotide may be methylated to form 5-methylcytosine"
ttcacatatattcacatatcttcttatttgaggactcaggttgaaggagcaagtgctattcgagatataaagctctcaaggaagagggtaggtttccaagaagattacatgtatacccatag

SEQ ID NO: 21191 - DNA, 122 bp, Homo sapiens
  misc_feature (61)..(62): /note="This region represents a CpG dinucleotide"
  misc_feature (61)..(61): /note="Nucleotide may be methylated to form 5-methylcytosine"
cacaagaaggaacaactatttataggaagtattaggaaatctgggcactaccattgattgcggatttaccaagaactgtgctaggcattgtgggagctacctaagaagaataaaacagaatc

SEQ ID NO: 21192 - DNA, 122 bp, Homo sapiens
  misc_feature (61)..(62): /note="This region represents a CpG dinucleotide"
  misc_feature (61)..(61): /note="Nucleotide may be methylated to form 5-methylcytosine"
ccgactttggcagcaagcatacaccctgattactcaatgccagggacagagagaggccagcgctaggagcaatgaggactggcttggccactcactcgcatgtgaccccaggcaagtcactt

SEQ ID NO: 21193 - DNA, 122 bp, Homo sapiens
  misc_feature (61)..(62): /note="This region represents a CpG dinucleotide"
  misc_feature (61)..(61): /note="Nucleotide may be methylated to form 5-methylcytosine"
tagattaccagggagctgtttataaataatagattttcattctaggctctctatatcttacgcagcataagcagttgaaattctagttagctaagggattcttaaagggaaagctctgaagt

SEQ ID NO: 21194 - DNA, 122 bp, Homo sapiens
  misc_feature (61)..(62): /note="This region represents a CpG dinucleotide"
  misc_feature (61)..(61): /note="Nucleotide may be methylated to form 5-methylcytosine"
tgcaatttcaggaaggaaatcagacctgaacctggcactcagagatgctcttccaactggcgttaagcagaaataaatagaagacaggatatgcttcattgcgtctctcaggtctaatgtct

SEQ ID NO: 21195 - DNA, 122 bp, Homo sapiens
  misc_feature (61)..(62): /note="This region represents a CpG dinucleotide"
  misc_feature (61)..(61): /note="Nucleotide may be methylated to form 5-methylcytosine"
gtgattgaatctgccaaacggacatcataggtgctcttgtcagaaaaagctcccagaagccgggcgcggtggctcatacctgtaatcctggcactttgggaggctgaggcgggcagatcatg

SEQ ID NO: 21196 - DNA, 122 bp, Homo sapiens
  misc_feature (61)..(62): /note="This region represents a CpG dinucleotide"
  misc_feature (61)..(61): /note="Nucleotide may be methylated to form 5-methylcytosine"
gaccgaattatgaacatgggagagatgtaaaaaggcacagaaagacagtgagagagaatccgccagagacagagggctttgctttcgcccgcagcgattctgatgttatctatttccagctg

SEQ ID NO: 21197 - DNA, 122 bp, Homo sapiens
  misc_feature (61)..(62): /note="This region represents a CpG dinucleotide"
  misc_feature (61)..(61): /note="Nucleotide may be methylated to form 5-methylcytosine"
aaaacacaatagcttgtgtaattttgtcacatgcatctgttgctttcacctcttacattgcgctgatgtgctcaccagagcattcacgggagcaattctccctccccacccctgacacctgc

SEQ ID NO: 21198 - DNA, 122 bp, Homo sapiens
  misc_feature (61)..(62): /note="This region represents a CpG dinucleotide"
  misc_feature (61)..(61): /note="Nucleotide may be methylated to form 5-methylcytosine"
gaccccctcggagcatgcgcttttatgtgaccatgactcacactgggtcataatgtaaaacgtgtaactatgactgaaggccaaaaagtttgaaaaagatgctttagcgttaactggctggc

SEQ ID NO: 21199 - DNA, 122 bp, Homo sapiens
  misc_feature (61)..(62): /note="This region represents a CpG dinucleotide"
  misc_feature (61)..(61): /note="Nucleotide may be methylated to form 5-methylcytosine"
gcacaccgttctgagtagtgtgatgaaatcttacaccatcctgctccatcctgcttgggacgtgaatcatctctttgtccagcatatccacactgtatgcactccctgcccatgaatcacat

SEQ ID NO: 21200 - DNA, 122 bp, Homo sapiens
  misc_feature (61)..(62): /note="This region represents a CpG dinucleotide"
  misc_feature (61)..(61): /note="Nucleotide may be methylated to form 5-methylcytosine"
agataatgctcaataacattatcagccccaatccatataaaccagatatggctgtagagacgtagtttaatgttttattttttcctattccttagtttctcacttattcaggactatatatg

SEQ ID NO: 21201 - DNA, 122 bp, Homo sapiens
  misc_feature (61)..(62): /note="This region represents a CpG dinucleotide"
  misc_feature (61)..(61): /note="Nucleotide may be methylated to form 5-methylcytosine"
aaacaaacacagtaagtcacattgttggtgcggtccttccagacccaccgcagtgtcttgcgtcgtggggtcgtgagtctctgaacctggttcttctcagagttgacattttggacgtgggg

SEQ ID NO: 21202 - DNA, 122 bp, Homo sapiens
  misc_feature (61)..(62): /note="This region represents a CpG dinucleotide"
  misc_feature (61)..(61): /note="Nucleotide may be methylated to form 5-methylcytosine"
ccctgcagcagctccaggcctgggtctggaaactcactcatttagtgaatatctgtcgaacggaactggatttgggtttccttgtgggtaagaagagggcaggtggtgcgaagttagaggat

SEQ ID NO: 21203 - DNA, 122 bp, Homo sapiens
  misc_feature (61)..(62): /note="This region represents a CpG dinucleotide"
  misc_feature (61)..(61): /note="Nucleotide may be methylated to form 5-methylcytosine"
cggggtttcaccacgttggctggcatggtcttgatctcttgacctcatgatctgcccattcggtctcccaaagtgctgggattacaggtgtgagcgaccgcacccagccccattaattatat

SEQ ID NO: 21204 - DNA, 122 bp, Homo sapiens
  misc_feature (61)..(62): /note="This region represents a CpG dinucleotide"
  misc_feature (61)..(61): /note="Nucleotide may be methylated to form 5-methylcytosine"
acagcgcccacatcctcatgccattgacatgggacgcccgggcccgagtgccaaccactgcgcctgagcagagcctctgcacagcaggatgaggcctggctccaacacaaactgggagagaa

SEQ ID NO: 21205 - DNA, 122 bp, Homo sapiens
  misc_feature (61)..(62): /note="This region represents a CpG dinucleotide"
  misc_feature (61)..(61): /note="Nucleotide may be methylated to form 5-methylcytosine"
ttggctctgtttcattagtaatctgagagccacatgaaacaattgagttgtgagaaaaaccgtctctaagacttacaatgtatgactaagaattgctgtgccttgtgaaagattaggactaa

SEQ ID NO: 21206 - DNA, 122 bp, Homo sapiens
  misc_feature (61)..(62): /note="This region represents a CpG dinucleotide"
  misc_feature (61)..(61): /note="Nucleotide may be methylated to form 5-methylcytosine"
tcccctttagaacttccgggcttagtattttccttatgttgtctctgagagcctgacttccgttctccctgctaggctatccccaggcgtttccttccttgattcatgaactctaagatgac

SEQ ID NO: 21207 - DNA, 122 bp, Homo sapiens
  misc_feature (61)..(62): /note="This region represents a CpG dinucleotide"
  misc_feature (61)..(61): /note="Nucleotide may be methylated to form 5-methylcytosine"
tccttggcattcccggagcctgagtcaatgtccggattgggaatgctgacccagctgctccggctttcctctctctgcccctccctttctctcctccttccagcctcttccatcccagccct

SEQ ID NO: 21208 - DNA, 122 bp, Homo sapiens
  misc_feature (61)..(62): /note="This region represents a CpG dinucleotide"
  misc_feature (61)..(61): /note="Nucleotide may be methylated to form 5-methylcytosine"
cgctgctccccacccctcaagtatggccgttcacagggacagtttctaacgagtggagtacggaaaggaggaaaataactttactgaggagaaacttggcaaacaccacctcagtcagccag

SEQ ID NO: 21209 - DNA, 122 bp, Homo sapiens
  misc_feature (61)..(62): /note="This region represents a CpG dinucleotide"
  misc_feature (61)..(61): /note="Nucleotide may be methylated to form 5-methylcytosine"
gtaaatgtcccattcttaaacactgagagaagaaagagtgggaggagaatggaagaaatacgctgtcaacagggaacgtgatttcttactcaggctaaaggtatccagggatgaagccaatc

SEQ ID NO: 21210 - DNA, 122 bp, Homo sapiens
  misc_feature (61)..(62): /note="This region represents a CpG dinucleotide"
  misc_feature (61)..(61): /note="Nucleotide may be methylated to form 5-methylcytosine"
ggtcaaggagggaatgtgctgacagagcacaacagtacagaggatgagagcaggcacagtcgtggagcagcaagcttgactcatggttaaaccatgcctctgcttgtgctgtaaatagacct

SEQ ID NO: 21211 - DNA, 122 bp, Homo sapiens
  misc_feature (61)..(62): /note="This region represents a CpG dinucleotide"
  misc_feature (61)..(61): /note="Nucleotide may be methylated to form 5-methylcytosine"
accctcttgcaatggtgagacccataaccagaaggacagactggcaaggcaattaagagacggatagatacacagggaaaaaaagggaagttcaaaacagaaatagggtgaggcacagggaa

SEQ ID NO: 21212 - DNA, 122 bp, Homo sapiens
  misc_feature (61)..(62): /note="This region represents a CpG dinucleotide"
  misc_feature (61)..(61): /note="Nucleotide may be methylated to form 5-methylcytosine"
ttttatttctggctttacttgtttaggcttcattagagcagacaatgcctctttcacatccgtattcattgtcaggaagttatttcagtagtccaatgagagatcgtggtgatttggattag

SEQ ID NO: 21213 - DNA, 122 bp, Homo sapiens
  misc_feature (61)..(62): /note="This region represents a CpG dinucleotide"
  misc_feature (61)..(61): /note="Nucleotide may be methylated to form 5-methylcytosine"
gcacatgctgcatgatattaacacttcctgtttacttgttggacttcccctagagcccagcgtgatgactccatcagtatctgtgacagtttcttgtgtgttctgtgtgccgagcttagtgc

SEQ ID NO: 21214 - DNA, 122 bp, Homo sapiens
  misc_feature (61)..(62): /note="This region represents a CpG dinucleotide"
  misc_feature (61)..(61): /note="Nucleotide may be methylated to form 5-methylcytosine"
aagagtaaaacttcaagtgttcaggctgaacgccttgctcaggtttacacgatgggtacacgagatagggggaaccgaacagatggagagatgagaagaacaggaagtgtggggccctgggc

SEQ ID NO: 21215 - DNA, 122 bp, Homo sapiens
  misc_feature (61)..(62): /note="This region represents a CpG dinucleotide"
  misc_feature (61)..(61): /note="Nucleotide may be methylated to form 5-methylcytosine"
tatatgccctgagggaactaacacagttgcataggatggcaagaaacctatacatttttgcggaatgaattaataaaatctattgacttttgtgctctgcttttctcccttaactttattgc

SEQ ID NO: 21216 - DNA, 122 bp, Homo sapiens
  misc_feature (61)..(62): /note="This region represents a CpG dinucleotide"
  misc_feature (61)..(61): /note="Nucleotide may be methylated to form 5-methylcytosine"
agaccaaatttctaaatgtaaactcttcctatctcaacatctatataacaatgtttcttacgtaataccttctacaaacatactgtaccagaataaacactggacagaacattaagaactgc

SEQ ID NO: 21217 - DNA, 122 bp, Homo sapiens
  misc_feature (61)..(62): /note="This region represents a CpG dinucleotide"
  misc_feature (61)..(61): /note="Nucleotide may be methylated to form 5-methylcytosine"
ctaagggtacgacctgctgggagaatcatccatctatcttctaagtgctaattgagtgcacgcctttcttacctctgagtgttaaagctttgtcaggaaacgtggcaacatctcaggctgaa

SEQ ID NO: 21218 - DNA, 122 bp, Homo sapiens
  misc_feature (61)..(62): /note="This region represents a CpG dinucleotide"
  misc_feature (61)..(61): /note="Nucleotide may be methylated to form 5-methylcytosine"
agcctccggggcaacactggagctcttcggcatggtgttgtgcctgctgttccagcagttcgtaacgggctgtgctgctcctagccttgggggctttgcacatgctgtgtcctctgcagggg

SEQ ID NO: 21219 - DNA, 122 bp, Homo sapiens
  misc_feature (61)..(62): /note="This region represents a CpG dinucleotide"
  misc_feature (61)..(61): /note="Nucleotide may be methylated to form 5-methylcytosine"
cagctgctaagtatgtatatgccaattatgcattctggcactggggaaatgaccacaggacgagtccagggacccactggaccgaggtcagacctgagctaaaactctattaattacctgac

SEQ ID NO: 21220 - DNA, 122 bp, Homo sapiens
  misc_feature (61)..(62): /note="This region represents a CpG dinucleotide"
  misc_feature (61)..(61): /note="Nucleotide may be methylated to form 5-methylcytosine"
gtttagatacacaagtactgaccattgtgtttcaacagcctgcagtattcaggacagccacgtgctgggcaggtttgtagccgaggagtaataggctatatcgtatagcctgggtgtatagt

SEQ ID NO: 21221 - DNA, 122 bp, Homo sapiens
  misc_feature (61)..(62): /note="This region represents a CpG dinucleotide"
  misc_feature (61)..(61): /note="Nucleotide may be methylated to form 5-methylcytosine"
gtgactcagtccctcacatgctgtgctacacttagcttggatctctaacgatattttcttcgtcttcaggatccttctccgccttcataacgctcgaatattatcttccttgcaatgcagaa

SEQ ID NO: 21222 - DNA, 122 bp, Homo sapiens
  misc_feature (61)..(62): /note="This region represents a CpG dinucleotide"
  misc_feature (61)..(61): /note="Nucleotide may be methylated to form 5-methylcytosine"
agatctacattcaaatgctgtctcatcccctttgctaattgtatgatctttgggtgattacgtaacctctctgatcctgtttcctgagctgttaaaaggggaacaaaatgacattccttgaa

SEQ ID NO: 21223 - DNA, 122 bp, Homo sapiens
  misc_feature (61)..(62): /note="This region represents a CpG dinucleotide"
  misc_feature (61)..(61): /note="Nucleotide may be methylated to form 5-methylcytosine"
caggacataaaacaggaacgtgtaggagcttcctgttgaaaatgggactgatttatgttgcgccaccctaccttccagtggagtaatctgagccagcagagaagaaacttccctgctggttg

SEQ ID NO: 21224 - DNA, 122 bp, Homo sapiens
  misc_feature (61)..(62): /note="This region represents a CpG dinucleotide"
  misc_feature (61)..(61): /note="Nucleotide may be methylated to form 5-methylcytosine"
aatttctaaagcaggtgagaaacaaggcctgcccaagaaaagagaaagaatttaaaattacggcatatctatactacagaggaggcggtctgtccatgtcaatgtaaaggatcaccaagaga

SEQ ID NO: 21225 - DNA, 122 bp, Homo sapiens
  misc_feature (61)..(62): /note="This region represents a CpG dinucleotide"
  misc_feature (61)..(61): /note="Nucleotide may be methylated to form 5-methylcytosine"
cgggtgggggctgcccttggggtggaggccgtggagcgcatcccgctgtgtgatcgggcacgtggcttcgctgccctgaacctccctttcccagtttaggcctaggaatgccggcttcctgg

SEQ ID NO: 21226 - DNA, 122 bp, Homo sapiens
  misc_feature (61)..(62): /note="This region represents a CpG dinucleotide"
  misc_feature (61)..(61): /note="Nucleotide may be methylated to form 5-methylcytosine"
ttgccatactgtactcttcagaaggaagtcactatgtgcagccctcagttaaagagctggcgggaggagttatgtttcacttccttgagggcagagtatttacgtaaattatttggaattct

SEQ ID NO: 21227 - DNA, 122 bp, Homo sapiens
  misc_feature (61)..(62): /note="This region represents a CpG dinucleotide"
  misc_feature (61)..(61): /note="Nucleotide may be methylated to form 5-methylcytosine"
gttccggtagagaaatgaggcttaagatgaactaccctggcccttatgtgtcagagagaacggcttgacaaacacacactgaggatgtctgcagggataaaagaagaaagggagatgaccct

SEQ ID NO: 21228 - DNA, 122 bp, Homo sapiens
  misc_feature (61)..(62): /note="This region represents a CpG dinucleotide"
  misc_feature (61)..(61): /note="Nucleotide may be methylated to form 5-methylcytosine"
tccatgcgtcaccttgctggtgatgcttcactggatcacttggttccggggttgtccgcacgtctccctgtagtgcaggtgctccttcctgtttccaattagcctgtgggatgggacttgga

SEQ ID NO: 21229 - DNA, 122 bp, Homo sapiens
  misc_feature (61)..(62): /note="This region represents a CpG dinucleotide"
  misc_feature (61)..(61): /note="Nucleotide may be methylated to form 5-methylcytosine"
gcacatgggccatacaaaacatcaggcaggctagggttttggctcatgggtcagaatgtacgtcaagtggttaaaactgtggttaggtctaagaagaggaagtagaacaaaagacaaggttt

SEQ ID NO: 21230 - DNA, 122 bp, Homo sapiens
  misc_feature (61)..(62): /note="This region represents a CpG dinucleotide"
  misc_feature (61)..(61): /note="Nucleotide may be methylated to form 5-methylcytosine"
caggacactgacacacctcgcggaaccccacatctgaaactgaaaaacagtaccatttcccgtccccagaagtctggaaaggcagttggctgcacaccatggcccctgctcactcccttctt

SEQ ID NO: 21231 - DNA, 122 bp, Homo sapiens
  misc_feature (61)..(62): /note="This region represents a CpG dinucleotide"
  misc_feature (61)..(61): /note="Nucleotide may be methylated to form 5-methylcytosine"
tgcttatatttgaacaaatagcaaaagctagaaagcctcaacatgctgggagaaagtttccgtcccttgggtgctttacatgttatccctgtggcaatgaatcatgctaggatttcaaccaa

SEQ ID NO: 21232 - DNA, 122 bp, Homo sapiens
  misc_feature (61)..(62): /note="This region represents a CpG dinucleotide"
  misc_feature (61)..(61): /note="Nucleotide may be methylated to form 5-methylcytosine"
ttccttcctttgttacagcaaacatcctgtaaacaattaatgttccactcttttaactgacggcttttgtttactgacaggaaaggaaaccacaaattcttcaagtagcaatagggactgca

SEQ ID NO: 21233 - DNA, 122 bp, Homo sapiens
  misc_feature (61)..(62): /note="This region represents a CpG dinucleotide"
  misc_feature (61)..(61): /note="Nucleotide may be methylated to form 5-methylcytosine"
aaggcaaactaaagtacattgggataggtactgtacttcagtgattcagaggaggaagcacgttcctattcagcttcagaaatgcttcaggaatgagctggactggtttgatagaaagagaa

SEQ ID NO: 21234 - DNA, 122 bp, Homo sapiens
  misc_feature (61)..(62): /note="This region represents a CpG dinucleotide"
  misc_feature (61)..(61): /note="Nucleotide may be methylated to form 5-methylcytosine"
aggcgcgaaggcacggaggccgcgctgagtgccctctccctccctgcagaagatggtgaccgccttgggcactcactggcacccagagcatttctgctgcgtcagttgcggggagcccttcg

SEQ ID NO: 21235 - DNA, 122 bp, Homo sapiens
  misc_feature (61)..(62): /note="This region represents a CpG dinucleotide"
  misc_feature (61)..(61): /note="Nucleotide may be methylated to form 5-methylcytosine"
caccttggaggagccaacagttttactcaatggtatcctgactggttagtgcaggacacacgacaggaatattaacggtgactgatgttatctataaaagctaggcttttttttcttaaagg

SEQ ID NO: 21236 - DNA, 122 bp, Homo sapiens
  misc_feature (61)..(62): /note="This region represents a CpG dinucleotide"
  misc_feature (61)..(61): /note="Nucleotide may be methylated to form 5-methylcytosine"
gcatgacatagcctgctatcttgttgtggagcttctcgctggggataatggcgatctcctcgcacacgcgcttatccgtgtggaagtcattgcccaggcgcgtgtagtacttttctgtgacg

SEQ ID NO: 21237 - DNA, 122 bp, Homo sapiens
  misc_feature (61)..(62): /note="This region represents a CpG dinucleotide"
  misc_feature (61)..(61): /note="Nucleotide may be methylated to form 5-methylcytosine"
gtctagaatcacattcttacattgctccttgaagttttaggctttgtctgttgctgtccccgctggaagatgatgatttagtactcccttctcacttggccctcaccacaagcatgaccctt

SEQ ID NO: 21238 - DNA, 122 bp, Homo sapiens
  misc_feature (61)..(62): /note="This region represents a CpG dinucleotide"
  misc_feature (61)..(61): /note="Nucleotide may be methylated to form 5-methylcytosine"
ttatgacacaagtccaacatgagtcttgtgaattgcatgctaaatctaatatttgagcagcgtaacaactttgggcctagagatgttatcagtggagtttctttatgtttcctaactgtccc

SEQ ID NO: 21239 - DNA, 122 bp, Homo sapiens
  misc_feature (61)..(62): /note="This region represents a CpG dinucleotide"
  misc_feature (61)..(61): /note="Nucleotide may be methylated to form 5-methylcytosine"
gctgcccctcccttactgtgtagagaacttggtgcagcggggccctctttgcccccacaccgaggcatatcttcaggaatttggagcactggctcatctggattagcagcctgagctgccca

SEQ ID NO: 21240 - DNA, 122 bp, Homo sapiens
  misc_feature (61)..(62): /note="This region represents a CpG dinucleotide"
  misc_feature (61)..(61): /note="Nucleotide may be methylated to form 5-methylcytosine"
gtgtcaaagcagagatcctcttctactcctagaaggtagttaagtgccctttccttaattcgtatacctttaagggtcaactgccttaaagtaataaaatactagaggaagttactttagaa

SEQ ID NO: 21241 - DNA, 122 bp, Homo sapiens
  misc_feature (61)..(62): /note="This region represents a CpG dinucleotide"
  misc_feature (61)..(61): /note="Nucleotide may be methylated to form 5-methylcytosine"
ctgcatgctgcactgcacgccactgtggtccaggacctgggcctgcacgacggcatccagcgcgtgctgtttggcaacaacctgaacttctggctgcacaagcttgtcttcgtggatgccgt

SEQ ID NO: 21242 - DNA, 122 bp, Homo sapiens
  misc_feature (61)..(62): /note="This region represents a CpG dinucleotide"
  misc_feature (61)..(61): /note="Nucleotide may be methylated to form 5-methylcytosine"
tcgaactcctgatctcaagtgatccgcccgcctcgcctcccaaagtgctgggattacaggcgtgagccacggcacccagcctgcttagctttttggtaaagcattatgagactaaaccaggg

SEQ ID NO: 21243 - DNA, 122 bp, Homo sapiens
  misc_feature (61)..(62): /note="This region represents a CpG dinucleotide"
  misc_feature (61)..(61): /note="Nucleotide may be methylated to form 5-methylcytosine"
cgtttctgccactgctgtcgatgctgatgtggaacctctactacatgttcgtggtggagccggagcgcatgctcactgccaccgagagccgcctggactacccggaccacgcccgctcggcc

SEQ ID NO: 21244 - DNA, 122 bp, Homo sapiens
  misc_feature (61)..(62): /note="This region represents a CpG dinucleotide"
  misc_feature (61)..(61): /note="Nucleotide may be methylated to form 5-methylcytosine"
cattaaagtagccattgccgccggagcagagccggcttggctgcctgaggaggaggcacgcgccaaacccagcagagtgatgcctgggcaggagttacgcaccctcccccggccgcctggca

SEQ ID NO: 21245 - DNA, 122 bp, Homo sapiens
  misc_feature (61)..(62): /note="This region represents a CpG dinucleotide"
  misc_feature (61)..(61): /note="Nucleotide may be methylated to form 5-methylcytosine"
acaacacggttgatttaaagggcgagtcttttgtgccttgcagtcccaaatgctcagccccgtttctacatagagaacagatactgtatacagtacaaagattgaggcaggctacaccagta

SEQ ID NO: 21246 - DNA, 122 bp, Homo sapiens
  misc_feature (61)..(62): /note="This region represents a CpG dinucleotide"
  misc_feature (61)..(61): /note="Nucleotide may be methylated to form 5-methylcytosine"
tcagagtatcgggcacaccgcaaagctgtctccatttatttacttctaattgaaagctggcgtgctgagggttactccacccaggcgtgaagcgtagccatccgtgaaagatttcccaagac

SEQ ID NO: 21247 - DNA, 122 bp, Homo sapiens
  misc_feature (61)..(62): /note="This region represents a CpG dinucleotide"
  misc_feature (61)..(61): /note="Nucleotide may be methylated to form 5-methylcytosine"
ataaaggttgagttaggacaagaacccagttttctaggcagtgctctccccatacatggccgctatttatttccttccttccttccttccttccttctttccttctttcttttctctttctt

SEQ ID NO: 21248 - DNA, 122 bp, Homo sapiens
  misc_feature (61)..(62): /note="This region represents a CpG dinucleotide"
  misc_feature (61)..(61): /note="Nucleotide may be methylated to form 5-methylcytosine"
agagaaggagagaagggttcagagaactaaaactgaatatgaaggtggagaaagatgggccgtatttcaagttctgaggccacagagtcacagctgtaacaatggttcttttagaaagataa

SEQ ID NO: 21249 - DNA, 122 bp, Homo sapiens
  misc_feature (61)..(62): /note="This region represents a CpG dinucleotide"
  misc_feature (61)..(61): /note="Nucleotide may be methylated to form 5-methylcytosine"
gtggtgtttgggttgcaattctcatttgtggcttttattgttcccttctccacatttcagcgcaatggcagatgtttcctaagtgtatacccctcgtgttactttacatccccttgcaggat

SEQ ID NO: 21250 - DNA, 122 bp, Homo sapiens
  misc_feature (61)..(62): /note="This region represents a CpG dinucleotide"
  misc_feature (61)..(61): /note="Nucleotide may be methylated to form 5-methylcytosine"
attgacggtaacagcgatgatgactcttttgaacaacatgtaagagcctattctgcaccacgccttgctctcaaggaggcttgtaatcaagaaaaaaaaaaaaaaaaaaaaaaaacttggaa

SEQ ID NO: 21251 - DNA, 122 bp, Homo sapiens
  misc_feature (61)..(62): /note="This region represents a CpG dinucleotide"
  misc_feature (61)..(61): /note="Nucleotide may be methylated to form 5-methylcytosine"
ggtgatacgcctgccttagcctcccaaagtgctgggattagaggtgtgaatgaccgcacccggcctagatgccattatgtttcaaattcttaagacacctgtattaagaatgaatagacagc

SEQ ID NO: 21252 - DNA, 122 bp, Homo sapiens
  misc_feature (61)..(62): /note="This region represents a CpG dinucleotide"
  misc_feature (61)..(61): /note="Nucleotide may be methylated to form 5-methylcytosine"
atgtgggtggggacgagccagaggagaaggtagttacctctgaaaacgaggcaggaaaggcggttcttgaacaactggtaggtcaagaagtaccacctgctgaagagtcaccagaggtgaca

SEQ ID NO: 21253 - DNA, 122 bp, Homo sapiens
  misc_feature (61)..(62): /note="This region represents a CpG dinucleotide"
  misc_feature (61)..(61): /note="Nucleotide may be methylated to form 5-methylcytosine"
atcataccaggtttctggggtggggctatattgggtacctagtgagtcatgttaatgagccgtgtatagccttaaggccatattggtatccaggagcccgatgatgctctatgctatagctt

SEQ ID NO: 21254 - DNA, 122 bp, Homo sapiens
  misc_feature (61)..(62): /note="This region represents a CpG dinucleotide"
  misc_feature (61)..(61): /note="Nucleotide may be methylated to form 5-methylcytosine"
caaggtgttccagtcgggggcctccgggacatgcctcagcaacttttcttacatgcaaaacgcacccagctcgagctcccccaacttctcctgcaaaggcaggaatggtttgagcagggcca

SEQ ID NO: 21255 - DNA, 122 bp, Homo sapiens
  misc_feature (61)..(62): /note="This region represents a CpG dinucleotide"
  misc_feature (61)..(61): /note="Nucleotide may be methylated to form 5-methylcytosine"
gcgccgtgcgtgaatctgctcgctgatctgctccaggttacgaagggccacggagtagcgcgtcttggcctgagctacctgctgctccagttctgtcaccttggccttgtgctcctgcagag

SEQ ID NO: 21256 - DNA, 122 bp, Homo sapiens
  misc_feature (61)..(62): /note="This region represents a CpG dinucleotide"
  misc_feature (61)..(61): /note="Nucleotide may be methylated to form 5-methylcytosine"
tagccagttcgcaaagggacgagaaccttgcctccgccgccgccgcgcaactctcggtggcgcatgaattatgagatgtaaacattagctaagcacaaaaggaggaagggtcattctgaggc

SEQ ID NO: 21257 - DNA, 122 bp, Homo sapiens
  misc_feature (61)..(62): /note="This region represents a CpG dinucleotide"
  misc_feature (61)..(61): /note="Nucleotide may be methylated to form 5-methylcytosine"
gctgccccttcagcaaacaagaccaagccccagcaagacacagtaacctaattgcagaaccggcaccaccaccccctcttaaatagcagctgctccacctcccaccttgctcccctcaaccg

SEQ ID NO: 21258 - DNA, 122 bp, Homo sapiens
  misc_feature (61)..(62): /note="This region represents a CpG dinucleotide"
  misc_feature (61)..(61): /note="Nucleotide may be methylated to form 5-methylcytosine"
aaaggcggagaaaccaagccttgcatatatataaacatgaccccttacctgggatatggtcgatgcagctgtagtgacaatctcagagcagcttctacaccacagccatttccagcatgaag

SEQ ID NO: 21259 - DNA, 122 bp, Homo sapiens
  misc_feature (61)..(62): /note="This region represents a CpG dinucleotide"
  misc_feature (61)..(61): /note="Nucleotide may be methylated to form 5-methylcytosine"
cactctctctctcttcctgctctgctacggtaagacgtgctttgctttccctttgccttccgccatgattctaagtttcctgaggcctccccagccatgcagaactgtgagtcaatctaacc

SEQ ID NO: 21260 - DNA, 122 bp, Homo sapiens
  misc_feature (61)..(62): /note="This region represents a CpG dinucleotide"
  misc_feature (61)..(61): /note="Nucleotide may be methylated to form 5-methylcytosine"
gagcaatgcctcttgtgttgagctatgacatggttgggtctatttgttacaacagttagacgtcagtagcagaagcagagaggccccatcattttttactcacagtatgagagcagccttct

SEQ ID NO: 21261 - DNA, 122 bp, Homo sapiens
  misc_feature (61)..(62): /note="This region represents a CpG dinucleotide"
  misc_feature (61)..(61): /note="Nucleotide may be methylated to form 5-methylcytosine"
taatcctcaatgaaagacactcaacaagaatacaaaaaaagaaaaataaaacaaaaagaacgaaagctgattaagtgctgttagactgcttaaagagcactaagaaagcctgtctcaaacaa

SEQ ID NO: 21262 - DNA, 122 bp, Homo sapiens
  misc_feature (61)..(62): /note="This region represents a CpG dinucleotide"
  misc_feature (61)..(61): /note="Nucleotide may be methylated to form 5-methylcytosine"
aaagagtgcccctgctgaaactgctgtttatcttgcaagggccctccagggtggagctctcgccctctcctggctcagccttaaacttcactataagtaagcagaatacagcggagacaaga

SEQ ID NO: 21263 - DNA, 122 bp, Homo sapiens
  misc_feature (61)..(62): /note="This region represents a CpG dinucleotide"
  misc_feature (61)..(61): /note="Nucleotide may be methylated to form 5-methylcytosine"
gtccctccctggccgcgtggcttattgcacaagaatgggggaggggcggctagagagagccggtcaggaccagagcggttgagaaggttgaaacccacctcaccaactcaggtgggctcttc

SEQ ID NO: 21264 - DNA, 122 bp, Homo sapiens
  misc_feature (61)..(62): /note="This region represents a CpG dinucleotide"
  misc_feature (61)..(61): /note="Nucleotide may be methylated to form 5-methylcytosine"
aacccctgttggctacactgagtttggacaccagggttcagtgaggcgagctccctaggccgtccgagcaggataagggaggaaggactcaagccggccttgtttgtgctgggtcttgcaca

SEQ ID NO: 21265 - DNA, 122 bp, Homo sapiens
  misc_feature (61)..(62): /note="This region represents a CpG dinucleotide"
  misc_feature (61)..(61): /note="Nucleotide may be methylated to form 5-methylcytosine"
cctggggataatcagcacccttgtcatgatctgcatggccactcctgtcttcaccatcatcgtcattcctcttggcattatttatgtatctgttcaggtaggtttggaaatggctaagtcat

SEQ ID NO: 21266 - DNA, 122 bp, Homo sapiens
  misc_feature (61)..(62): /note="This region represents a CpG dinucleotide"
  misc_feature (61)..(61): /note="Nucleotide may be methylated to form 5-methylcytosine"
aatctgattaaaaggtctaatcatctatggagggataaggaagttgtggctttatatattcgttaaatgttttattcctgtatgtgattcacttttctaggtatagaggacatatcagtgaa

SEQ ID NO: 21267 - DNA, 122 bp, Homo sapiens
  misc_feature (61)..(62): /note="This region represents a CpG dinucleotide"
  misc_feature (61)..(61): /note="Nucleotide may be methylated to form 5-methylcytosine"
agattgggggaaggcattaaaaggggctgtgtggggcggagcagggcaggggcccgagcacgcaaatggggcaccctgaatgtgattctgcatgcagaccccactgtgtctcctgtggcctg

SEQ ID NO: 21268 - DNA, 122 bp, Homo sapiens
  misc_feature (61)..(62): /note="This region represents a CpG dinucleotide"
  misc_feature (61)..(61): /note="Nucleotide may be methylated to form 5-methylcytosine"
tacctctggagctgatcacttaaccttcaagttgaatactggagtccagtatcaaaacaccgcatttacattaacaagcatatgcttccccattccttaatcatcagaaggaatagagttat

SEQ ID NO: 21269 - DNA, 122 bp, Homo sapiens
  misc_feature (61)..(62): /note="This region represents a CpG dinucleotide"
  misc_feature (61)..(61): /note="Nucleotide may be methylated to form 5-methylcytosine"
aaggaagcacagaatgacgggcaggttctgtttgctctctcctcagcagtgtttggccagcgcttggatgagactgtggcctatgaacagaaattcggcccccatctggtgcccatcctggt

SEQ ID NO: 21270 - DNA, 122 bp, Homo sapiens
  misc_feature (61)..(62): /note="This region represents a CpG dinucleotide"
  misc_feature (61)..(61): /note="Nucleotide may be methylated to form 5-methylcytosine"
acacccacagccccgtccactgacaccttcagactcaagagcgagtgccaccgccctaaacggaaagacactcatcacggcagcatctttcaagtgaacagaaagtgtagtttctgaccttg

SEQ ID NO: 21271 - DNA, 122 bp, Homo sapiens
  misc_feature (61)..(62): /note="This region represents a CpG dinucleotide"
  misc_feature (61)..(61): /note="Nucleotide may be methylated to form 5-methylcytosine"
cccgctccccggagccccggcaccggcgctggccgactaccacgagtgcacggcctgccgcgtgagcttccacagcctcgaggcctacctggcgcacaagaagtactcgtgccccgctgcgc

SEQ ID NO: 21272 - DNA, 122 bp, Homo sapiens
  misc_feature (61)..(62): /note="This region represents a CpG dinucleotide"
  misc_feature (61)..(61): /note="Nucleotide may be methylated to form 5-methylcytosine"
agctcactcctgtggctcatgagtttgtgctggcttttaataggaggactcagttccaatcgtgtgaccttctccatagagcttcttgagtatccttattatgtgaccactgacttccttca

SEQ ID NO: 21273 - DNA, 122 bp, Homo sapiens
  misc_feature (61)..(62): /note="This region represents a CpG dinucleotide"
  misc_feature (61)..(61): /note="Nucleotide may be methylated to form 5-methylcytosine"
taatacttactaagacagtgactattatgactgcctctaattttaagatggttcagttgacgtttgaaaggaaaatgatttgctcaagggtatacataaaagagatagaaatgggcctgcaa

SEQ ID NO: 21274 - DNA, 122 bp, Homo sapiens
  misc_feature (61)..(62): /note="This region represents a CpG dinucleotide"
  misc_feature (61)..(61): /note="Nucleotide may be methylated to form 5-methylcytosine"
cacacaggaccagaacggggctaggagcagcatggatcctgggagagacagctgagctgccgtgcacctagatgagaaatcaaatgttttacaaggatctgcccctacctgggaaactcaag

SEQ ID NO: 21275 - DNA, 122 bp, Homo sapiens
  misc_feature (61)..(62): /note="This region represents a CpG dinucleotide"
  misc_feature (61)..(61): /note="Nucleotide may be methylated to form 5-methylcytosine"
ggaactagcagcagtgacctctgaggagccctgggaacaccctggagctcctgagcaacacgttgcttgtgatcactgacctggatatcatgactgtgtgagcaacaccccccacacctcag

SEQ ID NO: 21276 - DNA, 122 bp, Homo sapiens
  misc_feature (61)..(62): /note="This region represents a CpG dinucleotide"
  misc_feature (61)..(61): /note="Nucleotide may be methylated to form 5-methylcytosine"
tgaagtccacctggagatcttcaaagggggctgctccataagcttgtatgccgggtggaacggctggacattgcctagcattatgctgtgggcaggtaacacaccactgcgtcaccgttttg

SEQ ID NO: 21277 - DNA, 122 bp, Homo sapiens
  misc_feature (61)..(62): /note="This region represents a CpG dinucleotide"
  misc_feature (61)..(61): /note="Nucleotide may be methylated to form 5-methylcytosine"
aatgactctttcctgtttgagccacatcacccttcgttgtatgaaggcttaagtggcttccgtggtgagaatcttactctgtgtcataccctaattgaccttggagctggctttgctgtgta

SEQ ID NO: 21278 - DNA, 122 bp, Homo sapiens
  misc_feature (61)..(62): /note="This region represents a CpG dinucleotide"
  misc_feature (61)..(61): /note="Nucleotide may be methylated to form 5-methylcytosine"
ccaaggcgccgaacctggcagcggcatcctgtgtggggcagtgtggtgggcggtgcccagcgctaggaaaatccccagggtcacagctggggaatctgagccctactcaaatctgggtggct

SEQ ID NO: 21279 - DNA, 122 bp, Homo sapiens
  misc_feature (61)..(62): /note="This region represents a CpG dinucleotide"
  misc_feature (61)..(61): /note="Nucleotide may be methylated to form 5-methylcytosine"
aaagggccagagtcatagagattccaccttcatgaatgctgaatttgccaagaatgatatcggacagagaggagaagaggaagaagtaagccagacattcaagttatcagtcagttaataac

SEQ ID NO: 21280 - DNA, 122 bp, Homo sapiens
  misc_feature (61)..(62): /note="This region represents a CpG dinucleotide"
  misc_feature (61)..(61): /note="Nucleotide may be methylated to form 5-methylcytosine"
atatactttctccttccaaagcaacaactattgtcttgaaccccagtgatagacatcttacgctggttttaggtatacacatataacagcaaatacagattgttctcagataaagttgttaa

SEQ ID NO: 21281 - DNA, 122 bp, Homo sapiens
  misc_feature (61)..(62): /note="This region represents a CpG dinucleotide"
  misc_feature (61)..(61): /note="Nucleotide may be methylated to form 5-methylcytosine"
tgttccttgagtgtggccagggatggtgccaggagagctggtctggtgcatccctgccaacgacacactttgtgaatggctgcctggcaagtgctccatggaaagcaggggcttgggaggac

SEQ ID NO: 21282 - DNA, 122 bp, Homo sapiens
  misc_feature (61)..(62): /note="This region represents a CpG dinucleotide"
  misc_feature (61)..(61): /note="Nucleotide may be methylated to form 5-methylcytosine"
gcgttctcagctcccacacagtggcacacccctgagaaggttgagtcacgacctgtcatccgctgatcctagttaatgcatggtccccgcacagccaggcttaccttctgagcagcctccat

SEQ ID NO: 21283 - DNA, 122 bp, Homo sapiens
  misc_feature (61)..(62): /note="This region represents a CpG dinucleotide"
  misc_feature (61)..(61): /note="Nucleotide may be methylated to form 5-methylcytosine"
caagttagtgtgagactgcttggcatagaaagacgataaatgccacagacaaaacctaatcgtaactgaaataaataaattcgaacaacaaattgttaagtgaatggaatgcagctagctag

SEQ ID NO: 21284 - DNA, 122 bp, Homo sapiens
  misc_feature (61)..(62): /note="This region represents a CpG dinucleotide"
  misc_feature (61)..(61): /note="Nucleotide may be methylated to form 5-methylcytosine"
ctgataccacaaagaagctttttaatgaagttagcctttgcctttctcaatgccactatgcgcctggcttgttttgcccactttctgttttcaaagctaggtatgatcaggaaacacgtggt

SEQ ID NO: 21285 - DNA, 122 bp, Homo sapiens
  misc_feature (61)..(62): /note="This region represents a CpG dinucleotide"
  misc_feature (61)..(61): /note="Nucleotide may be methylated to form 5-methylcytosine"
ggcgttccaccggtcacctctgacacagcactgcctggggcccgaggcccggtggccccgcggtttctcgcgccaccaccccggggactgacacagcccgtgaaggctgggccaggctgggg

SEQ ID NO: 21286 - DNA, 122 bp, Homo sapiens
  misc_feature (61)..(62): /note="This region represents a CpG dinucleotide"
  misc_feature (61)..(61): /note="Nucleotide may be methylated to form 5-methylcytosine"
ggaccctgagtttaatactagtgaggattttttccattgcaattaaaagaaatccagttgcgattggctggagcaaaatttatgtatctatcaggcccagctgcacacagagcttacaggat

SEQ ID NO: 21287 - DNA, 122 bp, Homo sapiens
  misc_feature (61)..(62): /note="This region represents a CpG dinucleotide"
  misc_feature (61)..(61): /note="Nucleotide may be methylated to form 5-methylcytosine"
agctttagaaagcctcctgggtatttaccctatacaaccctgcctaagaacgaactttgacgtatgctgaatgttgactgctacatcccaaggttgtaaaaaaacaagacttagctatgtaa

SEQ ID NO: 21288 - DNA, 122 bp, Homo sapiens
  misc_feature (61)..(62): /note="This region represents a CpG dinucleotide"
  misc_feature (61)..(61): /note="Nucleotide may be methylated to form 5-methylcytosine"
cactcctcacacatggcatataaggcagggctttgcacacagaggctcattcaacactgacgttctgatgctacatgttcacagcttaaagatttcttgggcattctacagaaaaaaatctg

SEQ ID NO: 21289 - DNA, 122 bp, Homo sapiens
  misc_feature (61)..(62): /note="This region represents a CpG dinucleotide"
  misc_feature (61)..(61): /note="Nucleotide may be methylated to form 5-methylcytosine"
cggcgaggggatgaagccatttcaggttatgcacttgatcccaaagagttttttgtgcttcgctctctaagtgactcataagcagaattcagagaactgttctcattagaatcttgttccct

SEQ ID NO: 21290 - DNA, 122 bp, Homo sapiens
  misc_feature (61)..(62): /note="This region represents a CpG dinucleotide"
  misc_feature (61)..(61): /note="Nucleotide may be methylated to form 5-methylcytosine"
cctaatttaaacatatttttttagttactggggagtagcaccattgttggacagttgaaacgaccatttgatttattggatagatcatcggaaacatcatttggagcatgtgattgccaact

SEQ ID NO: 21291 - DNA, 122 bp, Homo sapiens
  misc_feature (61)..(62): /note="This region represents a CpG dinucleotide"
  misc_feature (61)..(61): /note="Nucleotide may be methylated to form 5-methylcytosine"
ataaaacttagaagcattatgacagaaaaaggaaacaaaccatttttactatagcaatgacgagatggaatatagaattgtctcatatttgaatatggacgacaacttggaatgagtttcag

SEQ ID NO: 21292 - DNA, 122 bp, Homo sapiens
  misc_feature (61)..(62): /note="This region represents a CpG dinucleotide"
  misc_feature (61)..(61): /note="Nucleotide may be methylated to form 5-methylcytosine"
tcactaaaagcggaagttctttctgttctttgaatgttgaatgagagtgtgagagagacacgtaccatcaggaaatggaactagccacggtcatagcttttcatttagttttgttagtcttt

SEQ ID NO: 21293 - DNA, 122 bp, Homo sapiens
  misc_feature (61)..(62): /note="This region represents a CpG dinucleotide"
  misc_feature (61)..(61): /note="Nucleotide may be methylated to form 5-methylcytosine"
cacaggctgggagttctcacgccctgcaggctttcatcatcctgacctttccaactagaacgtcgtcttttgctggctaatttgtaactgcccttcaagattcactggggatcagaaggctt

SEQ ID NO: 21294 - DNA, 122 bp, Homo sapiens
  misc_feature (61)..(62): /note="This region represents a CpG dinucleotide"
  misc_feature (61)..(61): /note="Nucleotide may be methylated to form 5-methylcytosine"
agcattccaggcacactctggtcgttttgttattctaatgtccacttatttcatgtctgccgtgaccgtgacagttttcagtcacacagagctgccatcaaaagagtgataagcttgtaagt

SEQ ID NO: 21295 - DNA, 122 bp, Homo sapiens
  misc_feature (61)..(62): /note="This region represents a CpG dinucleotide"
  misc_feature (61)..(61): /note="Nucleotide may be methylated to form 5-methylcytosine"
tcactctatcacccagggtggagtgcagtatactcacagtatactcatagccaatagcaccgtaactcacccctcattgaagcttgttcaacacagtttttttctctgtaaggcatgttata

SEQ ID NO: 21296 - DNA, 122 bp, Homo sapiens
  misc_feature (61)..(62): /note="This region represents a CpG dinucleotide"
  misc_feature (61)..(61): /note="Nucleotide may be methylated to form 5-methylcytosine"
atgatggtgatgaaagtggctggtgactgttctcagtctcatcgccataatggaaccctacgttgtgttcctccacactggtgtgagggacactactaagtgcggcagagtttgcactcagg

SEQ ID NO: 21297 - DNA, 122 bp, Homo sapiens
  misc_feature (61)..(62): /note="This region represents a CpG dinucleotide"
  misc_feature (61)..(61): /note="Nucleotide may be methylated to form 5-methylcytosine"
atacctcacttttccgtgtacaaagttttgacaaagcccttgtatatccatcatcccattcgtgccttcaagccccataaggtggtttgataaagttatcacccccatactgcagataagaa

SEQ ID NO: 21298 - DNA, 122 bp, Homo sapiens
  misc_feature (61)..(62): /note="This region represents a CpG dinucleotide"
  misc_feature (61)..(61): /note="Nucleotide may be methylated to form 5-methylcytosine"
gtctcggcagatttccctgaccttgcgtgccaaggcagaaggtgagatggcaaacagatgcgcgcttccactgagagcgtgcatgtgtgtgcgtgtatgtgagtgcgtgcatgtgtgtgcgt

SEQ ID NO: 21299 - DNA, 122 bp, Homo sapiens
  misc_feature (61)..(62): /note="This region represents a CpG dinucleotide"
  misc_feature (61)..(61): /note="Nucleotide may be methylated to form 5-methylcytosine"
cagggtgtgctttattgcatagctgcttgggagtttttctttagctgccccatctgttggcgaggatgcggcatctgaatgaggcccagggctgcagtggggaatgtgaacccgctgtcctt

SEQ ID NO: 21300 - DNA, 122 bp, Homo sapiens
  misc_feature (61)..(62): /note="This region represents a CpG dinucleotide"
  misc_feature (61)..(61): /note="Nucleotide may be methylated to form 5-methylcytosine"
caaatcacatggataggtatgtggcaattatgaaactcagtgctgactaataaagcccagcggcacacagagtaaaggtccaggagcagagactttcccagtagctctcgaaggaagtgttg

SEQ ID NO: 21301 - DNA, 122 bp, Homo sapiens
  misc_feature (61)..(62): /note="This region represents a CpG dinucleotide"
  misc_feature (61)..(61): /note="Nucleotide may be methylated to form 5-methylcytosine"
aagctgttcagcttttgcacagatgtctggcattatgtaggcaaactctctctgaactgacggacattttggcaggagaaagacagagcatttatagcatttattacatgctctgggtcaaa

SEQ ID NO: 21302 - DNA, 122 bp, Homo sapiens
  misc_feature (61)..(62): /note="This region represents a CpG dinucleotide"
  misc_feature (61)..(61): /note="Nucleotide may be methylated to form 5-methylcytosine"
gtgtcattcagagacagttggctgtatccaagggttgccttccctacttcagttgcattgcgtagagcaggctcaacccctccaggggagggtgcccttgcgtacccacagtcaggtgtaga

SEQ ID NO: 21303 - DNA, 122 bp, Homo sapiens
  misc_feature (61)..(62): /note="This region represents a CpG dinucleotide"
  misc_feature (61)..(61): /note="Nucleotide may be methylated to form 5-methylcytosine"
agaatgaaagaaacagcaaacacagggagctggttgcagctcatcaagaccgtcccattacgttcccgagtcagtccacaggcacctattgttgacattaggacttttcatttactcaagct

SEQ ID NO: 21304 - DNA, 122 bp, Homo sapiens
  misc_feature (61)..(62): /note="This region represents a CpG dinucleotide"
  misc_feature (61)..(61): /note="Nucleotide may be methylated to form 5-methylcytosine"
tctaccactttctagctgggtgacctagggcaatttactcacactcttcatgttttagttcgctcatctgtaagtgggacttgtcatcaactgtacattgtgagattttcctaggaataaat

SEQ ID NO: 21305 - DNA, 122 bp, Homo sapiens
  misc_feature (61)..(62): /note="This region represents a CpG dinucleotide"
  misc_feature (61)..(61): /note="Nucleotide may be methylated to form 5-methylcytosine"
agttcagtccctagcgactaacagtgagcagaggaagtaaagggggagttgtaagagaggcggtatcaacagcctgctgatgaaagaggcgactctgcagaaagaggcaacttgacatatca

SEQ ID NO: 21306 - DNA, 122 bp, Homo sapiens
  misc_feature (61)..(62): /note="This region represents a CpG dinucleotide"
  misc_feature (61)..(61): /note="Nucleotide may be methylated to form 5-methylcytosine"
ttcttatttgttcattagaaatgttcagtctcttccctttgagggaataacaaggggtagcggagtggagaagacctgagttatgaaccagggcacctgtctcagccattattcagcttatt

SEQ ID NO: 21307 - DNA, 122 bp, Homo sapiens
  misc_feature (61)..(62): /note="This region represents a CpG dinucleotide"
  misc_feature (61)..(61): /note="Nucleotide may be methylated to form 5-methylcytosine"
atgtctaagtgtgtgagggtgagaacccaggacccagaggctgacagtgagtcaccttgacgtcaaagtgtgctgtgcttgattccatgttccttttagcccacatccaagactaatggatg

SEQ ID NO: 21308 - DNA, 122 bp, Homo sapiens
  misc_feature (61)..(62): /note="This region represents a CpG dinucleotide"
  misc_feature (61)..(61): /note="Nucleotide may be methylated to form 5-methylcytosine"
ctcctccgaggaaactaggatattgctgccttgcttaaaatctggctaagccctactccacgtgacatgcaaggccctttgtgacctggtcccttaggtcaagcctcccctcccactcctgc

SEQ ID NO: 21309 - DNA, 122 bp, Homo sapiens
  misc_feature (61)..(62): /note="This region represents a CpG dinucleotide"
  misc_feature (61)..(61): /note="Nucleotide may be methylated to form 5-methylcytosine"
ttcttgcgtacttttccacctgtgtttaaaaaacccccaagacgtgcaaaagttgggcttcgccaatagaagcagggaggtgaagagagagagagagagtaagtgaaagaaaatgaacttct

SEQ ID NO: 21310 - DNA, 122 bp, Homo sapiens
  misc_feature (61)..(62): /note="This region represents a CpG dinucleotide"
  misc_feature (61)..(61): /note="Nucleotide may be methylated to form 5-methylcytosine"
aaccccttttcccttctgcggtgcctgcccattaatactaggtggtgacaacaagattcgcgcacacttcaaatgggggattattctgggttttcaaggaaatttgagccacctgtttcaga

SEQ ID NO: 21311 - DNA, 122 bp, Homo sapiens
  misc_feature (61)..(62): /note="This region represents a CpG dinucleotide"
  misc_feature (61)..(61): /note="Nucleotide may be methylated to form 5-methylcytosine"
ttaattttcctctaagcagctgcctacagtctatgattcactggccatgaattgcaattgcgttatcacctgagaacacaaaaagactttggagaattagcatataagccaggaggggattt

SEQ ID NO: 21312 - DNA, 122 bp, Homo sapiens
  misc_feature (61)..(62): /note="This region represents a CpG dinucleotide"
  misc_feature (61)..(61): /note="Nucleotide may be methylated to form 5-methylcytosine"
ggccatcagaacttggggagagcagagcccgcctgcttcctgagtgaagcattgctcaagcgctctctgcccggccccctccgagtgtggttttcctcccaggccagcaccaaacccagaat

SEQ ID NO: 21313 - DNA, 122 bp, Homo sapiens
  misc_feature (61)..(62): /note="This region represents a CpG dinucleotide"
  misc_feature (61)..(61): /note="Nucleotide may be methylated to form 5-methylcytosine"
cactgcagccttgaatccctgggctcaagccatcctcctgagtagctgggactacaggcacgtgccactgccctgcctgaacctgttatttttaggaggctggagcagatgtgccctctctt

SEQ ID NO: 21314 - DNA, 122 bp, Homo sapiens
  misc_feature (61)..(62): /note="This region represents a CpG dinucleotide"
  misc_feature (61)..(61): /note="Nucleotide may be methylated to form 5-methylcytosine"
gcagttagaggactgaggtttcttttctggctgtcagccaggggtcactttctggttttacgcttggctccctcctcttcaaagcctgcaactgtgcttagaatccttttcataagctgaat

SEQ ID NO: 21315 - DNA, 122 bp, Homo sapiens
  misc_feature (61)..(62): /note="This region represents a CpG dinucleotide"
  misc_feature (61)..(61): /note="Nucleotide may be methylated to form 5-methylcytosine"
ctgccccgtaaagccttaagtccctggcccaagaagccgcagggcttagaaaatgcggagcggctgcaatccacgggcccatcctccactctgcacaagagatctctgccagccccagcact

SEQ ID NO: 21316 - DNA, 122 bp, Homo sapiens
  misc_feature (61)..(62): /note="This region represents a CpG dinucleotide"
  misc_feature (61)..(61): /note="Nucleotide may be methylated to form 5-methylcytosine"
gcaagggctcctctcttggcttcgttccccggagggtggtgctgttctcgttggagggggcggccaggcgctgggccacgtgtgcatgcagcccctacagagttgctgccccgtgggggttg

SEQ ID NO: 21317 - DNA, 122 bp, Homo sapiens
  misc_feature (61)..(62): /note="This region represents a CpG dinucleotide"
  misc_feature (61)..(61): /note="Nucleotide may be methylated to form 5-methylcytosine"
cagcaagctcacaagtgccagcctgacgtgagtagtgctaatatcaaatctgacaacttccgttcggagtcaggcaggcagaatggtatagggggcagagctttggcatcatacgaacctgg

SEQ ID NO: 21318 - DNA, 122 bp, Homo sapiens
  misc_feature (61)..(62): /note="This region represents a CpG dinucleotide"
  misc_feature (61)..(61): /note="Nucleotide may be methylated to form 5-methylcytosine"
ctccccagtctaaacaaatccactcagacagaaacaatggggtctctttgtttgggtgttcggcggctgaaagcgttgagccatatacatctgctcggcccgactcataagtagctgacccc

SEQ ID NO: 21319 - DNA, 122 bp, Homo sapiens
  misc_feature (61)..(62): /note="This region represents a CpG dinucleotide"
  misc_feature (61)..(61): /note="Nucleotide may be methylated to form 5-methylcytosine"
actggaaacaagactgttcctacttgtttatgtgaatgtttgttgttctgaattggatgacgatactcattgttatttcagaggagtggttgaagaatacatttttaaactaattagtgatg

SEQ ID NO: 21320 - DNA, 122 bp, Homo sapiens
  misc_feature (61)..(62): /note="This region represents a CpG dinucleotide"
  misc_feature (61)..(61): /note="Nucleotide may be methylated to form 5-methylcytosine"
ttgggctccaggctacaagcaggaatgagctcagtctcaactaggatctcgtggtgagtccgtagtaaaagtctctggttggcagggggagttattgaagggagttaattcagatggaagtg

SEQ ID NO: 21321 - DNA, 122 bp, Homo sapiens
  misc_feature (61)..(62): /note="This region represents a CpG dinucleotide"
  misc_feature (61)..(61): /note="Nucleotide may be methylated to form 5-methylcytosine"
ggagagctctacccagggccacacccaggacagcagagctcacctttgatcccctgatttcgccctggagaaggtggcacccagaatagaagccaggcatgggagggctggagtggagggac

SEQ ID NO: 21322 - DNA, 122 bp, Homo sapiens
  misc_feature (61)..(62): /note="This region represents a CpG dinucleotide"
  misc_feature (61)..(61): /note="Nucleotide may be methylated to form 5-methylcytosine"
agaggaacatgagtttgggttagggggcagtaatcagagtaggaagaatagataaccatacgactaacttttaagatgctgactaaagatggcagggatgtgagtcatgtgggattaactgg

SEQ ID NO: 21323 - DNA, 122 bp, Homo sapiens
  misc_feature (61)..(62): /note="This region represents a CpG dinucleotide"
  misc_feature (61)..(61): /note="Nucleotide may be methylated to form 5-methylcytosine"
acagcaatcccgcctcacagactcaaatgccatcagcgggaacaatcggaggaagtgtggcgctttctccgctcagggagcgaaacggggaccctgcttatcaaaatgacaagatttattca

SEQ ID NO: 21324 - DNA, 122 bp, Homo sapiens
  misc_feature (61)..(62): /note="This region represents a CpG dinucleotide"
  misc_feature (61)..(61): /note="Nucleotide may be methylated to form 5-methylcytosine"
aggagctcccatgttgtgcagttgctgctggcccggggaccacattgaatgacggctctacgtcctcatgcctccagctgctgccctgtacatgtccaactgcacggagcactttacatcct

SEQ ID NO: 21325 - DNA, 122 bp, Homo sapiens
  misc_feature (61)..(62): /note="This region represents a CpG dinucleotide"
  misc_feature (61)..(61): /note="Nucleotide may be methylated to form 5-methylcytosine"
tagcactaggaagggccttgagcacacatgtgtgggcactcagctcacatgtgcaagctccgcagtgccctcaagccacccctggtcaccacccgaggcctatgggtgtgcacaccagtaat

SEQ ID NO: 21326 - DNA, 122 bp, Homo sapiens
  misc_feature (61)..(62): /note="This region represents a CpG dinucleotide"
  misc_feature (61)..(61): /note="Nucleotide may be methylated to form 5-methylcytosine"
ttagtgggaaggcttctggctgcaaagccagtgctctttctgactaattgtgctgctcctcgttcaagtctagggtactggttaaaggcatggattttggaaggacagaccctaagattatt

SEQ ID NO: 21327 - DNA, 122 bp, Homo sapiens
  misc_feature (61)..(62): /note="This region represents a CpG dinucleotide"
  misc_feature (61)..(61): /note="Nucleotide may be methylated to form 5-methylcytosine"
aggttctcttaactgctgtatatttgtcatcatcactaacatttaatgaacacttaaccacgtgtcatggcattttacatagtgctttagacatattctgtgatttaattctctcaactacc

SEQ ID NO: 21328 - DNA, 122 bp, Homo sapiens
  misc_feature (61)..(62): /note="This region represents a CpG dinucleotide"
  misc_feature (61)..(61): /note="Nucleotide may be methylated to form 5-methylcytosine"
agtagtcaccatgctaaaattaaactagcagtgtctcaatacaaagcacaacaattaatccgcaggcaaagtggatggtcacgttcaagattatagcgcgcttaagttacatcacaaggagt

SEQ ID NO: 21329 - DNA, 122 bp, Homo sapiens
  misc_feature (61)..(62): /note="This region represents a CpG dinucleotide"
  misc_feature (61)..(61): /note="Nucleotide may be methylated to form 5-methylcytosine"
taaacgtcttagagacaaatctgtctatttcacataggaagccagttgagttgttcctcacgctttccccacgaagctgcatctgaaggacttcctcacccccccgctgtgatcacaagtta

SEQ ID NO: 21330 - DNA, 122 bp, Homo sapiens
  misc_feature (61)..(62): /note="This region represents a CpG dinucleotide"
  misc_feature (61)..(61): /note="Nucleotide may be methylated to form 5-methylcytosine"
ttggagaccctccttgtacccccaccccccctttaattgaaactgtgtgcatgcagtgagcgcaggattctagtaatccgacgggaggatccacttaaaagactaaaatccagaaaccccag

SEQ ID NO: 21331 - DNA, 122 bp, Homo sapiens
  misc_feature (61)..(62): /note="This region represents a CpG dinucleotide"
  misc_feature (61)..(61): /note="Nucleotide may be methylated to form 5-methylcytosine"
gcaacaaaggagagacatagagctcgaaaacaataactatgttccgaccatgaagagcttcgtgaatctctcagtcaccgtcagagtacagactctcttttcataatatcttacacctgtaa

SEQ ID NO: 21332 - DNA, 122 bp, Homo sapiens
  misc_feature (61)..(62): /note="This region represents a CpG dinucleotide"
  misc_feature (61)..(61): /note="Nucleotide may be methylated to form 5-methylcytosine"
aagcgagaaagaggaggtggctttggtctcccagggaagcccctttacacttgggctccacggactgcgtcctttgccctcaggcgcgcgcaccgcgggagtccagagcaaattgcccttag

SEQ ID NO: 21333 - DNA, 122 bp, Homo sapiens
  misc_feature (61)..(62): /note="This region represents a CpG dinucleotide"
  misc_feature (61)..(61): /note="Nucleotide may be methylated to form 5-methylcytosine"
agtttaggatgatgcctcatccaagttcaccccaacctgaggtcttactgacctaagaggcgcattcacaacagccagcttatcattgaataaggtaattgtgttctgtttttcaaagagca

SEQ ID NO: 21334 - DNA, 122 bp, Homo sapiens
  misc_feature (61)..(62): /note="This region represents a CpG dinucleotide"
  misc_feature (61)..(61): /note="Nucleotide may be methylated to form 5-methylcytosine"
gtttattaagcaggcacggggtgctcggatgtatgtgacagcactgtgctgggcacctcacgtcatgtgagttaatcctcaccacaccctgggtgatggaaccaagtgtcctgcaactctca

SEQ ID NO: 21335 - DNA, 122 bp, Homo sapiens
  misc_feature (61)..(62): /note="This region represents a CpG dinucleotide"
  misc_feature (61)..(61): /note="Nucleotide may be methylated to form 5-methylcytosine"
caggagaccaggagagagaccaccaaatatgtggtctcaatccagtccgttagaatgtagcgggcagcttgtctgttaatttcttttctctgagcctgggtcacctcccacaaggtttacaa

SEQ ID NO: 21336 - DNA, 122 bp, Homo sapiens
  misc_feature (61)..(62): /note="This region represents a CpG dinucleotide"
  misc_feature (61)..(61): /note="Nucleotide may be methylated to form 5-methylcytosine"
agtgagatgagtccactcatcatgcacttggatgtcttgacagtgtcaacttgctatgaacgtttctaagtgctcactttccttttctgtatttatcttgttgacccgtaacaaagagttga

SEQ ID NO: 21337 - DNA, 122 bp, Homo sapiens
  misc_feature (61)..(62): /note="This region represents a CpG dinucleotide"
  misc_feature (61)..(61): /note="Nucleotide may be methylated to form 5-methylcytosine"
tcatgtcctaatgcaatattataagacattgtaccacaacattccaatctaggctgctaacgcaatatgacatttctgtattatttgaatgcaattctaatacgacactctaaaataactaa

SEQ ID NO: 21338 - DNA, 122 bp, Homo sapiens
  misc_feature (61)..(62): /note="This region represents a CpG dinucleotide"
  misc_feature (61)..(61): /note="Nucleotide may be methylated to form 5-methylcytosine"
gcaggggacagagggttaacccagaattcagccaatgtgcttgttccatattcatgcccacgctgggaagtcacaagatggccaaggcacagctgcctgcaagccacgccacctcccacctc

SEQ ID NO: 21339 - DNA, 122 bp, Homo sapiens
  misc_feature (61)..(62): /note="This region represents a CpG dinucleotide"
  misc_feature (61)..(61): /note="Nucleotide may be methylated to form 5-methylcytosine"
gctctccatctctttcattcccagggacactgtgacttagccatgccaaggattcctatacgtcgagtaactctgattgccacaatgccctgctgccccttgtggtgaattcatccacattg

SEQ ID NO: 21340 - DNA, 122 bp, Homo sapiens
  misc_feature (61)..(62): /note="This region represents a CpG dinucleotide"
  misc_feature (61)..(61): /note="Nucleotide may be methylated to form 5-methylcytosine"
gaatgtcaaaataaggaagagagagtggttgataatcagtagagagaggtttctaactcacggaagtgtttgcaatacaacctctttgtacatcagctgtgtggaacaacatacttgtcact

SEQ ID NO: 21341 - DNA, 122 bp, Homo sapiens
  misc_feature (61)..(62): /note="This region represents a CpG dinucleotide"
  misc_feature (61)..(61): /note="Nucleotide may be methylated to form 5-methylcytosine"
agcacccgtgccctcgatcacatcgccagttcacaaacacacatgcgcacacgcacacgccgcccgcccaccaggcagacacccacacacctgtgcacgcacgcgcacgccaagccagcggg

SEQ ID NO: 21342 - DNA, 122 bp, Homo sapiens
  misc_feature (61)..(62): /note="This region represents a CpG dinucleotide"
  misc_feature (61)..(61): /note="Nucleotide may be methylated to form 5-methylcytosine"
acttcgacactacaaaagcataccatgagtggcgatttctggcaagtatttcttctaccacggcacacagaaattctcagggaagaatacatgttcaagagaatacgcaacatcaaaatacc

SEQ ID NO: 21343 - DNA, 122 bp, Homo sapiens
  misc_feature (61)..(62): /note="This region represents a CpG dinucleotide"
  misc_feature (61)..(61): /note="Nucleotide may be methylated to form 5-methylcytosine"
gagggaaacgatcgtctccacttcacttcctcctgctacacctcagataagtactgctgacgggtggaatcgaattcacagcaagaatcctagcttcaagagagtccaggaaatatttctca

SEQ ID NO: 21344 - DNA, 122 bp, Homo sapiens
  misc_feature (61)..(62): /note="This region represents a CpG dinucleotide"
  misc_feature (61)..(61): /note="Nucleotide may be methylated to form 5-methylcytosine"
tattattatcctcctttcttacagatcaggagacagacacagagaggttaattaactcaccgaaggtcccagagttagaatattgcaaagctggatttgaacccagacagtctagtgcagca

SEQ ID NO: 21345 - DNA, 122 bp, Homo sapiens
  misc_feature (61)..(62): /note="This region represents a CpG dinucleotide"
  misc_feature (61)..(61): /note="Nucleotide may be methylated to form 5-methylcytosine"
cttctgcaaacctgcttcctgcttcaagtttttcccgccccaaaatgcttaaaagttgctcgctttctttgttaggggctcagactttcaggacacatgtctgctgagccgatatacaccta

SEQ ID NO: 21346 - DNA, 122 bp, Homo sapiens
  misc_feature (61)..(62): /note="This region represents a CpG dinucleotide"
  misc_feature (61)..(61): /note="Nucleotide may be methylated to form 5-methylcytosine"
ttgcaggagggggtttgcgccgggtggagcttgcgtgaggagcgcttttggatcgtcctccgtgagttgggcgccatggctgccttctgggcagagtgcagggcctgccttaaatgttgtgg

SEQ ID NO: 21347 - DNA, 122 bp, Homo sapiens
  misc_feature (61)..(62): /note="This region represents a CpG dinucleotide"
  misc_feature (61)..(61): /note="Nucleotide may be methylated to form 5-methylcytosine"
ctatgagctccttgaagacaggaactgggagtcagaacaataaaattgacctaattaacacgcaatggtgtcactcttgggtcaaagagaaaaccagcagtagaaacagatgcaggctgatg

SEQ ID NO: 21348 - DNA, 122 bp, Homo sapiens
  misc_feature (61)..(62): /note="This region represents a CpG dinucleotide"
  misc_feature (61)..(61): /note="Nucleotide may be methylated to form 5-methylcytosine"
ttcgctactttggcagcataataaatgactaagcacctgattatgcacctaatcatttctcgtcttcgactgttaattctttcatttaagtacttgtctccccagtaagtaaaataagccac

SEQ ID NO: 21349 - DNA, 122 bp, Homo sapiens
  misc_feature (61)..(62): /note="This region represents a CpG dinucleotide"
  misc_feature (61)..(61): /note="Nucleotide may be methylated to form 5-methylcytosine"
tcttaatagtttgcccagacagctcaccttcagtaccccagagcctccagcctggcagtccgggctccaggtacctctagagggctgtggcgcacactatgcataagtcacagggacactgg

SEQ ID NO: 21350 - DNA, 122 bp, Homo sapiens
  misc_feature (61)..(62): /note="This region represents a CpG dinucleotide"
  misc_feature (61)..(61): /note="Nucleotide may be methylated to form 5-methylcytosine"
tcctgacctctttcttcttcttggcttcttctaggttgctgagcagtgtcttgcgctcttcgtttgttttttctatgagagtctttatctgtttcaccccgttgacagcattttgaatttcc

SEQ ID NO: 21351 - DNA, 122 bp, Homo sapiens
  misc_feature (61)..(62): /note="This region represents a CpG dinucleotide"
  misc_feature (61)..(61): /note="Nucleotide may be methylated to form 5-methylcytosine"
ctcagtcactggacatcttaggatcaccctatcatgaatcagagctcgaagcagggagagcggcaagaggttgagacttgctaatgttatgaggtacctgttgtatgccaggcacccactgg

SEQ ID NO: 21352 - DNA, 122 bp, Homo sapiens
  misc_feature (61)..(62): /note="This region represents a CpG dinucleotide"
  misc_feature (61)..(61): /note="Nucleotide may be methylated to form 5-methylcytosine"
ggtgattcagacaacagtaatgcagtgatccagggcccagggcaagctggctgtaaggaacgggtgcggggcctcacaggtgctgccggcctggacagggaagacaagggcctgggatcagc

SEQ ID NO: 21353 - DNA, 122 bp, Homo sapiens
  misc_feature (61)..(62): /note="This region represents a CpG dinucleotide"
  misc_feature (61)..(61): /note="Nucleotide may be methylated to form 5-methylcytosine"
taattcatggtggaggcaaggcaggcttgctttctctggcattcctctaggcttctcactcgccagcttttggctgcttctgttatctaggccaagcagagtcaatgaccctgagatgtgga

SEQ ID NO: 21354 - DNA, 122 bp, Homo sapiens
  misc_feature (61)..(62): /note="This region represents a CpG dinucleotide"
  misc_feature (61)..(61): /note="Nucleotide may be methylated to form 5-methylcytosine"
ttttattatcaccatctgcttgaaattctaaacaatgttggtgattaaaatactcctcctcgaaagggtaggctcacccccaaccttggtacaccactgtaacaagctctccataccaatta

SEQ ID NO: 21355 - DNA, 122 bp, Homo sapiens
  misc_feature (61)..(62): /note="This region represents a CpG dinucleotide"
  misc_feature (61)..(61): /note="Nucleotide may be methylated to form 5-methylcytosine"
atataatagttctctaggactgccacagcaaatcaccatgaactgggtagcttaacacaacgaatttattctctcacagttctggaggccggaagtctgaaatcaaggtctcggcagggttg

SEQ ID NO: 21356 - DNA, 122 bp, Homo sapiens
  misc_feature (61)..(62): /note="This region represents a CpG dinucleotide"
  misc_feature (61)..(61): /note="Nucleotide may be methylated to form 5-methylcytosine"
attcagatgttctctggggcctcagctcatgattaattcatcaagtattggttgagctctcgtcacatgtcagggatcatgccttgtgttgaggcttacaatggaaagcaagaactacaaga

SEQ ID NO: 21357 - DNA, 122 bp, Homo sapiens
  misc_feature (61)..(62): /note="This region represents a CpG dinucleotide"
  misc_feature (61)..(61): /note="Nucleotide may be methylated to form 5-methylcytosine"
aactagttgttagtcacttttaatgattcagttgtcaggcagttttgggttgtgcatttgcgagttgccaccagaatgactaagtgtgataatttaatgactcctgactgacctccactgcc

SEQ ID NO: 21358 - DNA, 122 bp, Homo sapiens
  misc_feature (61)..(62): /note="This region represents a CpG dinucleotide"
  misc_feature (61)..(61): /note="Nucleotide may be methylated to form 5-methylcytosine"
atagaaggcaatgtggacaagacaatggaacaggataatgaggaagaggacaacagatcacgagaatgagagaaaagccacagagatcacagaggccagagatagaatagctaggacaaaaa

SEQ ID NO: 21359 - DNA, 122 bp, Homo sapiens
  misc_feature (61)..(62): /note="This region represents a CpG dinucleotide"
  misc_feature (61)..(61): /note="Nucleotide may be methylated to form 5-methylcytosine"
aaaactagttcaggccttgatgggaagcggaagtcaaacatggcctcacaaacatccgcacggagaccctaagactaatagaggactctgataagaaacatttgcagtgtattcccggcttc

SEQ ID NO: 21360 - DNA, 122 bp, Homo sapiens
  misc_feature (61)..(62): /note="This region represents a CpG dinucleotide"
  misc_feature (61)..(61): /note="Nucleotide may be methylated to form 5-methylcytosine"
caggctccacagagtcagatcacggcttcacaccagtcgttctggtcacttaggcgttcgcgtgagcgctcaaccccttaccgccacctcatcgtcactctacaccattctgagcgcaaaaa

SEQ ID NO: 21361 - DNA, 122 bp, Homo sapiens
  misc_feature (61)..(62): /note="This region represents a CpG dinucleotide"
  misc_feature (61)..(61): /note="Nucleotide may be methylated to form 5-methylcytosine"
aagttaccatattgtataaacatagaagaaatgatcatgaaataacaaagcttagacaaacgcactctgattaacagacaccatgagccctggctgctgaagcggttgctgtgggcagcctc

SEQ ID NO: 21362 - DNA, 122 bp, Homo sapiens
  misc_feature (61)..(62): /note="This region represents a CpG dinucleotide"
  misc_feature (61)..(61): /note="Nucleotide may be methylated to form 5-methylcytosine"
ttacgtgttctaacttgcaagtctctttccctcttactctgctaagaataaaagaaaaggcggaaggaagagatgaaaagggggtcattccaactcattaaaacagggaaaaaccaactatt

SEQ ID NO: 21363 - DNA, 122 bp, Homo sapiens
  misc_feature (61)..(62): /note="This region represents a CpG dinucleotide"
  misc_feature (61)..(61): /note="Nucleotide may be methylated to form 5-methylcytosine"
tttatgtgcaaatctacacgtccctttctctactggggaagaacagagataaggagcggacgtgctcaaagggtgagtcaatgggatcttaggccaggagcctattgttttcccatttgggc

SEQ ID NO: 21364 - DNA, 122 bp, Homo sapiens
  misc_feature (61)..(62): /note="This region represents a CpG dinucleotide"
  misc_feature (61)..(61): /note="Nucleotide may be methylated to form 5-methylcytosine"
acacccacagaagcggccttgagctgcccagttctttttctttggcggggggagagggggcggataagatcattaacataataatgcgtgagctgagtttttgcatatgatcattagcataa

SEQ ID NO: 21365 - DNA, 122 bp, Homo sapiens
  misc_feature (61)..(62): /note="This region represents a CpG dinucleotide"
  misc_feature (61)..(61): /note="Nucleotide may be methylated to form 5-methylcytosine"
gcaacttagacacaatcacacccacagaaaaccgccacagtccatgacttgctgtgtgtgcgtgtgtgtgttaaaatgggagactcattcttgagcaatctgagaagatgactcaggacaat

SEQ ID NO: 21366 - DNA, 122 bp, Homo sapiens
  misc_feature (61)..(62): /note="This region represents a CpG dinucleotide"
  misc_feature (61)..(61): /note="Nucleotide may be methylated to form 5-methylcytosine"
tagaggtgtgagccacggcacctgccccaatcaacaggtatttattgagcatctactatacgccaggcactggtaaagactgtgagaatgcagtattgaacaagacaaagctctctgttctg

SEQ ID NO: 21367 - DNA, 122 bp, Homo sapiens
  misc_feature (61)..(62): /note="This region represents a CpG dinucleotide"
  misc_feature (61)..(61): /note="Nucleotide may be methylated to form 5-methylcytosine"
atcagtaggcattttgttgtataacacaccctatagcagcatgaatgaagtaaggattggcgagatcttgagaagctcacacagttgcagaattcttgctatagttggcctcttctgtctgt

SEQ ID NO: 21368 - DNA, 122 bp, Homo sapiens
  misc_feature (61)..(62): /note="This region represents a CpG dinucleotide"
  misc_feature (61)..(61): /note="Nucleotide may be methylated to form 5-methylcytosine"
acttcttactcactcagagctttgtcatttcctgtttaaaatctttcagttggccgggtgcggtggctcacgcctgtaatcccagcactttgggaggctgaggcgggcggatcacgaggtca

SEQ ID NO: 21369 - DNA, 122 bp, Homo sapiens
  misc_feature (61)..(62): /note="This region represents a CpG dinucleotide"
  misc_feature (61)..(61): /note="Nucleotide may be methylated to form 5-methylcytosine"
aaagagtcacacatgagctttgttccacagcaaagcatagtccagcaatgccatagtacccgtctctttgccactgtgcatgatgagtcaggcacacatcacctcgaggcccctcaggagaa

SEQ ID NO: 21370 - DNA, 122 bp, Homo sapiens
  misc_feature (61)..(62): /note="This region represents a CpG dinucleotide"
  misc_feature (61)..(61): /note="Nucleotide may be methylated to form 5-methylcytosine"
agactctgttctcttcccataatgtacattatccaaatggtctcttgttgtgggtggattcgggtaaaaattgtcttcaccacgtggggcctcagtttcctcatctgcaaaaaaaaaggagt

SEQ ID NO: 21371 - DNA, 122 bp, Homo sapiens
  misc_feature (61)..(62): /note="This region represents a CpG dinucleotide"
  misc_feature (61)..(61): /note="Nucleotide may be methylated to form 5-methylcytosine"
agccgccacacagaaaacccaggaacaagcaagacactggagttaggcacatctaggctgcgccacccctaactgtgtgacctgagaaaggcacctaaaccaaactggtcttgtctcctaac

SEQ ID NO: 21372 - DNA, 122 bp, Homo sapiens
  misc_feature (61)..(62): /note="This region represents a CpG dinucleotide"
  misc_feature (61)..(61): /note="Nucleotide may be methylated to form 5-methylcytosine"
tacctaacgctcttccttcttttcttagataaaacatgcatgccaggcagttcaagcctgcgaagactgctggttatacaggatatctgggtataaataaaccaacacatttgtatacaagg

SEQ ID NO: 21373 - DNA, 122 bp, Homo sapiens
  misc_feature (61)..(62): /note="This region represents a CpG dinucleotide"
  misc_feature (61)..(61): /note="Nucleotide may be methylated to form 5-methylcytosine"
ttgggtctgctgtcctttggaaggctcatgctttgcacagacactggaacgttctgggcacgtgcagtcagaagccagacaatacattctgatgatgcaggtgatgagaagtcagcctcgtg

SEQ ID NO: 21374 - DNA, 122 bp, Homo sapiens
  misc_feature (61)..(62): /note="This region represents a CpG dinucleotide"
  misc_feature (61)..(61): /note="Nucleotide may be methylated to form 5-methylcytosine"
tggcctgaggtttaatcctgtttcaaccacataacaattcacagtaggtctgttgaagggcggctcaagagttcagctgcaaccctgtttagctgtttagcataatcaacaacttcttgagt

SEQ ID NO: 21375 - DNA, 122 bp, Homo sapiens
  misc_feature (61)..(62): /note="This region represents a CpG dinucleotide"
  misc_feature (61)..(61): /note="Nucleotide may be methylated to form 5-methylcytosine"
gcaacacagcgagactccatctctacaaaacatttttaaaatcagccaggcatggtaacacgtgcctatagtcccagccgctcaggaaactgaagtgagagaatcgcttgagcccaggagga

SEQ ID NO: 21376 - DNA, 122 bp, Homo sapiens
  misc_feature (61)..(62): /note="This region represents a CpG dinucleotide"
  misc_feature (61)..(61): /note="Nucleotide may be methylated to form 5-methylcytosine"
aatagagtttatgtctgtatcacaactctcttgtctcaaaaataataaaagcacacctaacgggtctacttgtcagtgactataaggtgccatattaatcagaagtggaattttttgaaaaa

SEQ ID NO: 21377 - DNA, 122 bp, Homo sapiens
  misc_feature (61)..(62): /note="This region represents a CpG dinucleotide"
  misc_feature (61)..(61): /note="Nucleotide may be methylated to form 5-methylcytosine"
acttagcctgggtcagttgctaactgaggtctgctctatgaccccatttcctggcctggccgctgctcagatcctggcctctaagggaacatttaaattcttaatcctaagtctccctgcct

SEQ ID NO: 21378 - DNA, 122 bp, Homo sapiens
  misc_feature (61)..(62): /note="This region represents a CpG dinucleotide"
  misc_feature (61)..(61): /note="Nucleotide may be methylated to form 5-methylcytosine"
ctcgggacatctgagttcatttcgagaacctacgatccccagcaaacatcgcttgcaaaacgtatgctggcaaggcaagaccttcgcagaagcatcaaggcgctctagacacaccggacact

SEQ ID NO: 21379 - DNA, 122 bp, Homo sapiens
  misc_feature (61)..(62): /note="This region represents a CpG dinucleotide"
  misc_feature (61)..(61): /note="Nucleotide may be methylated to form 5-methylcytosine"
gtgcatttggagccagtgcagtaagaggtggggtccccagagtttcctgccaagagtctgcgacatttgtgtgtgtttcactaggtttcataacggctcactcctggaggtcattgctgcgc

SEQ ID NO: 21380 - DNA, 122 bp, Homo sapiens
  misc_feature (61)..(62): /note="This region represents a CpG dinucleotide"
  misc_feature (61)..(61): /note="Nucleotide may be methylated to form 5-methylcytosine"
agctaactcaagcctaaccccttatgaaaggtggatttcctgtacaactgttctgacaagcggaggattaggcacttcatacattctgcttgggtaagagactcacgacagaagtgaatcac

SEQ ID NO: 21381 - DNA, 122 bp, Homo sapiens
  misc_feature (61)..(62): /note="This region represents a CpG dinucleotide"
  misc_feature (61)..(61): /note="Nucleotide may be methylated to form 5-methylcytosine"
gagatcctggtgtgttgcctgggggcagtggctgggtaaccctgcatccttcactgcattcggtattttgggggtggcagggccagctccttctgctcatccttagcctaagcccagtcttc

SEQ ID NO: 21382 - DNA, 122 bp, Homo sapiens
  misc_feature (61)..(62): /note="This region represents a CpG dinucleotide"
  misc_feature (61)..(61): /note="Nucleotide may be methylated to form 5-methylcytosine"
ggcctgaatgacgtgacctttcaaccatctttctaaagaatattgtgaattacaccccttcgcatgtaagaaaagtttctgctggtatctaaggaatattgtctcatgggacctcagctgag

SEQ ID NO: 21383 - DNA, 122 bp, Homo sapiens
  misc_feature (61)..(62): /note="This region represents a CpG dinucleotide"
  misc_feature (61)..(61): /note="Nucleotide may be methylated to form 5-methylcytosine"
acactttttaacacagtgaaaaactcattttgtacaaaaccccattatgtggaacagacacgcaggttgatggccaatttagctaatagagctttgcagctgacattgaattaaatctgcag

SEQ ID NO: 21384 - DNA, 122 bp, Homo sapiens
  misc_feature (61)..(62): /note="This region represents a CpG dinucleotide"
  misc_feature (61)..(61): /note="Nucleotide may be methylated to form 5-methylcytosine"
ctcccattgacttcacagccacttggagcctgactcacagccacctcccttttccttcctcgcaactgtggagtttaattcttgttgttaattagattaatcagagtgatcgctgcagcgat

SEQ ID NO: 21385 - DNA, 122 bp, Homo sapiens
  misc_feature (61)..(62): /note="This region represents a CpG dinucleotide"
  misc_feature (61)..(61): /note="Nucleotide may be methylated to form 5-methylcytosine"
tgctgtgctggggagtgtcataaagtcctcgttagctgaaaggcactcaggggttctgaccgtacccctgcatcctctgcagagcttccttgggtcttcctgactctgcagaagttactcag

SEQ ID NO: 21386 - DNA, 122 bp, Homo sapiens
  misc_feature (61)..(62): /note="This region represents a CpG dinucleotide"
  misc_feature (61)..(61): /note="Nucleotide may be methylated to form 5-methylcytosine"
agtacctacttcataggcttgttgaaaagctaaaggagctaattcacacaatgctttgtacgtagtgaggttcagtaattttagttgtcattatcgttatctgaaggtcctcaagtatcttc

SEQ ID NO: 21387 - DNA, 122 bp, Homo sapiens
  misc_feature (61)..(62): /note="This region represents a CpG dinucleotide"
  misc_feature (61)..(61): /note="Nucleotide may be methylated to form 5-methylcytosine"
gtatttttcaatgcttcttacctgttatttgtgttttaatttattgctctatttttccatcgatgccactgtttttaattttgttccctataggtcaggttcatctgctcacttctgatgta

SEQ ID NO: 21388 - DNA, 122 bp, Homo sapiens
  misc_feature (61)..(62): /note="This region represents a CpG dinucleotide"
  misc_feature (61)..(61): /note="Nucleotide may be methylated to form 5-methylcytosine"
ttttgtgaggttagggagggatttcatgaggccaagtgatggttaaagccaggtcacatgcgggcactgtgtgttcatatctgctgcctctgacaaatgcagtaggttcagtctgggatgct

SEQ ID NO: 21389 - DNA, 122 bp, Homo sapiens
  misc_feature (61)..(62): /note="This region represents a CpG dinucleotide"
  misc_feature (61)..(61): /note="Nucleotide may be methylated to form 5-methylcytosine"
tgctggatggcatcgaggcagtcttgaagatagtcattctcctgtggatggaaaggcacacgtgagcgtgggggacgctgtccaggttccgcccatgtcccctcaagtgagtgtctgggcat

SEQ ID NO: 21390 - DNA, 122 bp, Homo sapiens
  misc_feature (61)..(62): /note="This region represents a CpG dinucleotide"
  misc_feature (61)..(61): /note="Nucleotide may be methylated to form 5-methylcytosine"
cattcactctgggggaagccagctcttatgtcatggggacactcaagcagccctatgagccgtcttggaagaaaatgttccagctgagtcaagccttcaggtaactgcagcctcagctgtta

SEQ ID NO: 21391 - DNA, 122 bp, Homo sapiens
  misc_feature (61)..(62): /note="This region represents a CpG dinucleotide"
  misc_feature (61)..(61): /note="Nucleotide may be methylated to form 5-methylcytosine"
cgtcatgagatttcatcacgctgctcagaactgcaattcaaaacgtatgaattgtttattcgtggaattttccatttagtattttcagaccagggttgactgcaggtaactgaactgtggaa

SEQ ID NO: 21392 - DNA, 122 bp, Homo sapiens
  misc_feature (61)..(62): /note="This region represents a CpG dinucleotide"
  misc_feature (61)..(61): /note="Nucleotide may be methylated to form 5-methylcytosine"
gaagatgctgatggtggaactgtaactgtaccaaagatgatcaaatattttcagctataccgtttgggatttggagacagagtcctgtgttagaatcacagctttgccactaactgtgtgac

SEQ ID NO: 21393 - DNA, 122 bp, Homo sapiens
  misc_feature (61)..(62): /note="This region represents a CpG dinucleotide"
  misc_feature (61)..(61): /note="Nucleotide may be methylated to form 5-methylcytosine"
gtagtggaggagactgacacagtgaataaaacaatccaaaacctgaaagctggctccagccgaggcctgatgatgtaaccatcctgtccccaaatcactggaacaaactccaagcacaacta

SEQ ID NO: 21394 - DNA, 122 bp, Homo sapiens
  misc_feature (61)..(62): /note="This region represents a CpG dinucleotide"
  misc_feature (61)..(61): /note="Nucleotide may be methylated to form 5-methylcytosine"
atgtaggcttactcttagcatggccacaccacctcccttcccagggcctgtcctggttcacgcctgagatgctatggaattatgaacggccacttgccactctcagaaggatcccagtcccc

SEQ ID NO: 21395 - DNA, 122 bp, Homo sapiens
  misc_feature (61)..(62): /note="This region represents a CpG dinucleotide"
  misc_feature (61)..(61): /note="Nucleotide may be methylated to form 5-methylcytosine"
tggcagatgtggtatcccttgttctgccatgtggtaagtgaaactctctgtggcaccatccgcttggcacctccccacaccacctgcccctccactccccctggatgtgcaaggcatctagg

SEQ ID NO: 21396 - DNA, 122 bp, Homo sapiens
  misc_feature (61)..(62): /note="This region represents a CpG dinucleotide"
  misc_feature (61)..(61): /note="Nucleotide may be methylated to form 5-methylcytosine"
agggagggatcacaggacagagaaagcttcctactgaaataagtagtaattctgactgggcgtgaatttccttgagcagaatctgggaggcaaacaggaattgcttcagatacaaacgtagg

SEQ ID NO: 21397 - DNA, 122 bp, Homo sapiens
  misc_feature (61)..(62): /note="This region represents a CpG dinucleotide"
  misc_feature (61)..(61): /note="Nucleotide may be methylated to form 5-methylcytosine"
tacagtctcttatttcataatttcatcatgagaattccttatctacccagtgacctcagacgcttaggaggaaaagtgtttccaaatgtccagctcttatctgagcatcgtctgaattatgc

SEQ ID NO: 21398 - DNA, 122 bp, Homo sapiens
  misc_feature (61)..(62): /note="This region represents a CpG dinucleotide"
  misc_feature (61)..(61): /note="Nucleotide may be methylated to form 5-methylcytosine"
ggtatgtttccctggtcttgctctggtttgtttgattactagtggtttgtgcacagaaagcgtgtgtatgtatttcctgatgttgtggttagtattatcctagtgcccaccccttttataga

SEQ ID NO: 21399 - DNA, 122 bp, Homo sapiens
  misc_feature (61)..(62): /note="This region represents a CpG dinucleotide"
  misc_feature (61)..(61): /note="Nucleotide may be methylated to form 5-methylcytosine"
gtgcatgagctgtgcatgtgtcaccaggaaattccccagagcggggtggcttgaaatacccgggctcccctcggcctttatcctgcctcttccacctggagaacagctccccaactcctgtg

SEQ ID NO: 21400 - DNA, 122 bp, Homo sapiens
  misc_feature (61)..(62): /note="This region represents a CpG dinucleotide"
  misc_feature (61)..(61): /note="Nucleotide may be methylated to form 5-methylcytosine"
gttcctgatcagcagggaggtggaccagcagctgaatgacctaggacatcttcacccacccgtctggcagtggggaggctgctggccagagagacaggtgtctgggttagctgggctgcctc

SEQ ID NO: 21401 - DNA, 122 bp, Homo sapiens
  misc_feature (61)..(62): /note="This region represents a CpG dinucleotide"
  misc_feature (61)..(61): /note="Nucleotide may be methylated to form 5-methylcytosine"
gggcagaagtatccacacatggagacgggcagggctgaccgcatgcagttatcaggaacacgataactaacccactttgagcccatgctgttatcaggaacaataactaacccactcctaca

SEQ ID NO: 21402 - DNA, 122 bp, Homo sapiens
  misc_feature (61)..(62): /note="This region represents a CpG dinucleotide"
  misc_feature (61)..(61): /note="Nucleotide may be methylated to form 5-methylcytosine"
gtggttgggtcttcggattagacagtagcgatccagccgtgttaatgtcctgaatttcaccgttgactgacagtgtacatgtgggaacttgtccctgtttgtggaaaatagagttaggtatt

SEQ ID NO: 21403 - DNA, 122 bp, Homo sapiens
  misc_feature (61)..(62): /note="This region represents a CpG dinucleotide"
  misc_feature (61)..(61): /note="Nucleotide may be methylated to form 5-methylcytosine"
caatagaatgagaccatgtctctagatagctagctagataattgatacatagctttctgtcggaaatttttttcctagatttgaacctgtttttctaaagtagcattcaacacatcagcatt

SEQ ID NO: 21404 - DNA, 122 bp, Homo sapiens
  misc_feature (61)..(62): /note="This region represents a CpG dinucleotide"
  misc_feature (61)..(61): /note="Nucleotide may be methylated to form 5-methylcytosine"
gcagaggctctgaaacgggacaagcttgttttgtgtgaaggccagttggggagagtggaacgaggaagacagaaccagatcatctaggggccaaagaactgttttgttttgtgttgtttctt

SEQ ID NO: 21405 - DNA, 122 bp, Homo sapiens
  misc_feature (61)..(62): /note="This region represents a CpG dinucleotide"
  misc_feature (61)..(61): /note="Nucleotide may be methylated to form 5-methylcytosine"
ggaaaggcggaggcagacagccatgttgccagctcctgcgacggaggctgccaggcgggacgggctgggcacggcacgaggcggcaacaataggcacctcttcatcatctgcctctcaacac

SEQ ID NO: 21406 - DNA, 122 bp, Homo sapiens
  misc_feature (61)..(62): /note="This region represents a CpG dinucleotide"
  misc_feature (61)..(61): /note="Nucleotide may be methylated to form 5-methylcytosine"
tgaagtccagctggagaccttcaaagggggctgctccataagctcgtatgccgggcggaacggctggacgttgcctcgcgtcatgctgttggcaggtaacacaccactgcctcaccgttttg

SEQ ID NO: 21407 - DNA, 122 bp, Homo sapiens
  misc_feature (61)..(62): /note="This region represents a CpG dinucleotide"
  misc_feature (61)..(61): /note="Nucleotide may be methylated to form 5-methylcytosine"
gtacttagagcagtgatcgtttcagtaacaattctctgtatacatttccaggcccaatgacgcaggaagcagagggaggggagaggctggagagaagaaaaagatccagagatctcctgcaa

SEQ ID NO: 21408 - DNA, 122 bp, Homo sapiens
  misc_feature (61)..(62): /note="This region represents a CpG dinucleotide"
  misc_feature (61)..(61): /note="Nucleotide may be methylated to form 5-methylcytosine"
atgagcaagtccagctgagattagaagagctgcccagcttagcccagatcagcggacctccgggtaaccctgggacacatgagcaaagccagctgaggtcagcacacttactcatccctacc

SEQ ID NO: 21409 - DNA, 122 bp, Homo sapiens
  misc_feature (61)..(62): /note="This region represents a CpG dinucleotide"
  misc_feature (61)..(61): /note="Nucleotide may be methylated to form 5-methylcytosine"
tgctaaactgttgcaacaagggcctaaactgttgcaacaaggacagagccaggtgcctcacgcctgtaatcccaacgctttgggaggccaaggcgggtggatcacataagaccaggagttcg

SEQ ID NO: 21410 - DNA, 122 bp, Homo sapiens
  misc_feature (61)..(62): /note="This region represents a CpG dinucleotide"
  misc_feature (61)..(61): /note="Nucleotide may be methylated to form 5-methylcytosine"
gtctctctggaatcagatggaataaatatagacaaataaatataaatatacaccagctcacgcacagagacatcaaatggagtgccgggtttacaaattgctgactgtgttcataaacaaac

SEQ ID NO: 21411 - DNA, 122 bp, Homo sapiens
  misc_feature (61)..(62): /note="This region represents a CpG dinucleotide"
  misc_feature (61)..(61): /note="Nucleotide may be methylated to form 5-methylcytosine"
aagttaacacttggtgtgaactgagaacctgtcatcgaggctagagtcacgcttgggtatcggctattgcctgagtgtgctagagtcctcgaagagtaactgctgaccttattcactggctg

SEQ ID NO: 21412 - DNA, 122 bp, Homo sapiens
  misc_feature (61)..(62): /note="This region represents a CpG dinucleotide"
  misc_feature (61)..(61): /note="Nucleotide may be methylated to form 5-methylcytosine"
atctgtgttttaaggcccttccagcaagtctgacatgcttgaaagtttaaaggccaggcacgcctgtaatcccagcattttgggaggccaaggtgggcggatcacttgaggtcaggagttca

SEQ ID NO: 21413 - DNA, 122 bp, Homo sapiens
  misc_feature (61)..(62): /note="This region represents a CpG dinucleotide"
  misc_feature (61)..(61): /note="Nucleotide may be methylated to form 5-methylcytosine"
aaaataattcagcgccttgagttcctaggtaagcagactgaaatccagctcagtgtaaaacgtaaaatgaaacctaagattagccaatcaaaaaccaccaactaacctctcactagggactt

SEQ ID NO: 21414 - DNA, 122 bp, Homo sapiens
  misc_feature (61)..(62): /note="This region represents a CpG dinucleotide"
  misc_feature (61)..(61): /note="Nucleotide may be methylated to form 5-methylcytosine"
ctgcacttacagaaggggtggggaaagagtgatcacagtgacttcgctgcacagccacagcggggatgagacagcaagtgctaaacagctgcacgaattcgtttgcatttactatgtttcaa

SEQ ID NO: 21415 - DNA, 122 bp, Homo sapiens
  misc_feature (61)..(62): /note="This region represents a CpG dinucleotide"
  misc_feature (61)..(61): /note="Nucleotide may be methylated to form 5-methylcytosine"
ctcaggttgactcataatatgtcattttgctttgttgggattagtgtatagaaagttaagcgacactattccatgtactttgttaatcggggatagtaagtgaaatatcacattctacctgt

SEQ ID NO: 21416 - DNA, 122 bp, Homo sapiens
  misc_feature (61)..(62): /note="This region represents a CpG dinucleotide"
  misc_feature (61)..(61): /note="Nucleotide may be methylated to form 5-methylcytosine"
ggaaagtactgaatggcagagttactaatgacttctatcaaatcaccttttgctgactcccgtgttagtcctggatagcgtccttggcacacttgatttcagattttgacaggtgataaaag

SEQ ID NO: 21417 - DNA, 122 bp, Homo sapiens
  misc_feature (61)..(62): /note="This region represents a CpG dinucleotide"
  misc_feature (61)..(61): /note="Nucleotide may be methylated to form 5-methylcytosine"
tcccatgctgctgaagtgtcttagctggcttagctcaacatttctgttgtgtggttaacacggtcctgttctaagccttaagaacccatgactagaacaatgggatgatgcagcccagcggg

SEQ ID NO: 21418 - DNA, 122 bp, Homo sapiens
  misc_feature (61)..(62): /note="This region represents a CpG dinucleotide"
  misc_feature (61)..(61): /note="Nucleotide may be methylated to form 5-methylcytosine"
cagctccctacaatggttgaatcaagctcttgagctctaaatccctacattaaaacctcacgcaaccttgcaagtggaataaaatacctaaagcagcttctgttttcctggtcaaaccttga

SEQ ID NO: 21419 - DNA, 122 bp, Homo sapiens
  misc_feature (61)..(62): /note="This region represents a CpG dinucleotide"
  misc_feature (61)..(61): /note="Nucleotide may be methylated to form 5-methylcytosine"
cagttcacagtagcgttcacagtcctatgagactaatgccaccactcatctgacaggaagcggagctcaggcagtaatgagagcaatggggagtggctgtagatacagacgaagcttcactt

SEQ ID NO: 21420 - DNA, 122 bp, Homo sapiens
  misc_feature (61)..(62): /note="This region represents a CpG dinucleotide"
  misc_feature (61)..(61): /note="Nucleotide may be methylated to form 5-methylcytosine"
ggagtattggcggtggataaggatggaaataggagagaggaattccaggcagaggacaagcggcgcctcctgacagaggcaagttgccacctgctgattagttaaggctgtgtggctagccc

SEQ ID NO: 21421 - DNA, 122 bp, Homo sapiens
  misc_feature (61)..(62): /note="This region represents a CpG dinucleotide"
  misc_feature (61)..(61): /note="Nucleotide may be methylated to form 5-methylcytosine"
ggtagctaatattgtctaccaagatattaataccttctattttaagcttcatatgctcctcggtgacctcatctcaaatctataagcaaacaaagaagtactgctttagaatatgcgaatta

SEQ ID NO: 21422 - DNA, 122 bp, Homo sapiens
  misc_feature (61)..(62): /note="This region represents a CpG dinucleotide"
  misc_feature (61)..(61): /note="Nucleotide may be methylated to form 5-methylcytosine"
gccatgtttacataataataaaacagctataagagggcagatgttttaggcctagacattcgctagtcagtaacatgtaaatgtgagagtcctcgtggttacggtttcacacctttccatgg

SEQ ID NO: 21423 - DNA, 122 bp, Homo sapiens
  misc_feature (61)..(62): /note="This region represents a CpG dinucleotide"
  misc_feature (61)..(61): /note="Nucleotide may be methylated to form 5-methylcytosine"
taaattagaacagggggtgcagtttttcacctggagaactcgcagaggtttaaataagatcgtacattttacgaagaaggcatctgtagcacccttatgaatgctttcccttctgggtgcat

SEQ ID NO: 21424 - DNA, 122 bp, Homo sapiens
  misc_feature (61)..(62): /note="This region represents a CpG dinucleotide"
  misc_feature (61)..(61): /note="Nucleotide may be methylated to form 5-methylcytosine"
aaatcaataagtcagtgaatgttggcaggtgttcagagattttttctgtgtgtcattcaccgtggcacagttaagtaactgcttatgattaagtttttcacagtctcagaaaataaggagtt

SEQ ID NO: 21425 - DNA, 122 bp, Homo sapiens
  misc_feature (61)..(62): /note="This region represents a CpG dinucleotide"
  misc_feature (61)..(61): /note="Nucleotide may be methylated to form 5-methylcytosine"
cctaatcacaccaatgacagtcaatcaccaccaaaatacacaaactatactttcctgtatcgtcatctcacacctaatatacagtcttggctaattcattatttataaatcttctttcccaa

SEQ ID NO: 21426 - DNA, 122 bp, Homo sapiens
  misc_feature (61)..(62): /note="This region represents a CpG dinucleotide"
  misc_feature (61)..(61): /note="Nucleotide may be methylated to form 5-methylcytosine"
cctgccctcaattttgttatcatttgattaggatagtttgcttgcctttttccatttgctcgtatgtgatgtgtcatagactgcagtactttccacctgtgtctcatagagaataaaatgag

SEQ ID NO: 21427 - DNA, 122 bp, Homo sapiens
  misc_feature (61)..(62): /note="This region represents a CpG dinucleotide"
  misc_feature (61)..(61): /note="Nucleotide may be methylated to form 5-methylcytosine"
ggtaagccccccgaccgggatgggttaactaggctgccagggtcaggatgtgaagaaccacgccaggtacctgctcaaccaaacaagggacttgtggtggagacattcagcagcttgaatat

SEQ ID NO: 21428 - DNA, 122 bp, Homo sapiens
  misc_feature (61)..(62): /note="This region represents a CpG dinucleotide"
  misc_feature (61)..(61): /note="Nucleotide may be methylated to form 5-methylcytosine"
gctgggattgcaggcgtgagctacaaggctaccaactgactgactcaggggatgtgtctccgcttaccatagatctgtcattagcgtatataggcctcaaagagctgtaagcaaccatgtct

SEQ ID NO: 21429 - DNA, 122 bp, Homo sapiens
  misc_feature (61)..(62): /note="This region represents a CpG dinucleotide"
  misc_feature (61)..(61): /note="Nucleotide may be methylated to form 5-methylcytosine"
caaatcaccaccaagggtcctggtgttttcataaagatcagccatctcattgatctgagacgccatcctaccagagcactggcttccctgaaaccctggagacagcttgttaaaaggacctc

SEQ ID NO: 21430 - DNA, 122 bp, Homo sapiens
  misc_feature (61)..(62): /note="This region represents a CpG dinucleotide"
  misc_feature (61)..(61): /note="Nucleotide may be methylated to form 5-methylcytosine"
tcacggggagggtgtgctggcgggatgggtggaagggcctggggccccggcagcccattgcggaggttttctcgggagatggtgggtatgggactaagggtgaaagggaagttgtgagttgg

SEQ ID NO: 21431 - DNA, 122 bp, Homo sapiens
  misc_feature (61)..(62): /note="This region represents a CpG dinucleotide"
  misc_feature (61)..(61): /note="Nucleotide may be methylated to form 5-methylcytosine"
tttctgtttaaacatgtatagtcggtttcatctgaacatccagtttaccctcttgctagacgtacaagttccttatgttctcatacttctggccaagcagttgatatattatattggtaaaa

SEQ ID NO: 21432 - DNA, 122 bp, Homo sapiens
  misc_feature (61)..(62): /note="This region represents a CpG dinucleotide"
  misc_feature (61)..(61): /note="Nucleotide may be methylated to form 5-methylcytosine"
cacttcgagggtgttccttttctctgtcacttcttaatccctgttacagttttggtaatccgtaattggataatttctgtttcttgaacacttctctgaagctaggtcagagccctgggaca

SEQ ID NO: 21433 - DNA, 122 bp, Homo sapiens
  misc_feature (61)..(62): /note="This region represents a CpG dinucleotide"
  misc_feature (61)..(61): /note="Nucleotide may be methylated to form 5-methylcytosine"
ctggagtttgcaggcagagagccccgttctgaacagggagccggagcctcagcgcggtgacgaagcacttattcattcattcggcagatatttgttgagtgcccactatgtgccaggttttt

SEQ ID NO: 21434 - DNA, 122 bp, Homo sapiens
  misc_feature (61)..(62): /note="This region represents a CpG dinucleotide"
  misc_feature (61)..(61): /note="Nucleotide may be methylated to form 5-methylcytosine"
tcacacagtggaagttccctgctttcagtccctgaatagcaaaggctatgccttggccatcgctgctggaagagacacggctcagtgttggatgaatgtcctgactgttttcgccccagaga

SEQ ID NO: 21435 - DNA, 122 bp, Homo sapiens
  misc_feature (61)..(62): /note="This region represents a CpG dinucleotide"
  misc_feature (61)..(61): /note="Nucleotide may be methylated to form 5-methylcytosine"
acaaaacaattagagatatcgggccatataatgcaagcacatgatgtgataaagggagaccgggctggtgatacgttgcatggaagctggttaaacctgaaggaagcccttatcttggttgc

SEQ ID NO: 21436 - DNA, 122 bp, Homo sapiens
  misc_feature (61)..(62): /note="This region represents a CpG dinucleotide"
  misc_feature (61)..(61): /note="Nucleotide may be methylated to form 5-methylcytosine"
gctaccatcttgctgatgtcagtacaatcttcctgaaatcttaacaaaggttgttaaagccgcactttgattttatctttaccctcagggcattatttctttcctgaaaaccttttgcaaga

SEQ ID NO: 21437 - DNA, 122 bp, Homo sapiens
  misc_feature (61)..(62): /note="This region represents a CpG dinucleotide"
  misc_feature (61)..(61): /note="Nucleotide may be methylated to form 5-methylcytosine"
aagtatcatctaaatcccttttctaactgttggcatttgtgtctttcaatattaaaaacacgtggaaagtcatagatttaaataaacaaaagtagtgacagataaagagtttctagattaaa

SEQ ID NO: 21438 - DNA, 122 bp, Homo sapiens
  misc_feature (61)..(62): /note="This region represents a CpG dinucleotide"
  misc_feature (61)..(61): /note="Nucleotide may be methylated to form 5-methylcytosine"
ttgaagaggccatcgggttactaaatggcattttggtcaccttttctttcctcccaagatcgtgaagaacaacctcattgccctaatgactcccaacttctgtctgcacgtgggtttgattg

SEQ ID NO: 21439 - DNA, 122 bp, Homo sapiens
  misc_feature (61)..(62): /note="This region represents a CpG dinucleotide"
  misc_feature (61)..(61): /note="Nucleotide may be methylated to form 5-methylcytosine"
taggatggtcactgctgtcgtatgaatcacaagacagctggggcaggcttggccctgaaccgtttgtggctttggtgtggaagtttagggtgtgtgtgtgtgtgtgtgtgtatgcgggcaca

SEQ ID NO: 21440 - DNA, 122 bp, Homo sapiens
  misc_feature (61)..(62): /note="This region represents a CpG dinucleotide"
  misc_feature (61)..(61): /note="Nucleotide may be methylated to form 5-methylcytosine"
attctccgtgtgaagcccttccaggtgtttcaagctcttggtttataggactgtgaatgtcgtcatcttaatacagcccttcccatcactttgatccctgatggaaaaattagctctcatct

SEQ ID NO: 21441 - DNA, 122 bp, Homo sapiens
  misc_feature (61)..(62): /note="This region represents a CpG dinucleotide"
  misc_feature (61)..(61): /note="Nucleotide may be methylated to form 5-methylcytosine"
cacttttgcacacaatattctctgaacctggattgcctaataaattcttaatttcccttccgtctctgaatcatacttctgtgaaatccaccctgatctctccacatgacatctcctcttat

SEQ ID NO: 21442 - DNA, 122 bp, Homo sapiens
  misc_feature (61)..(62): /note="This region represents a CpG dinucleotide"
  misc_feature (61)..(61): /note="Nucleotide may be methylated to form 5-methylcytosine"
gtaactgccaatgagtaagaaagagccaacctcagcttctttaatctctccccaaatgggcggaagaaccgtaggctctcactgaggttcctgcagtatctataaaaagaaccggaaggaca

SEQ ID NO: 21443 - DNA, 122 bp, Homo sapiens
  misc_feature (61)..(62): /note="This region represents a CpG dinucleotide"
  misc_feature (61)..(61): /note="Nucleotide may be methylated to form 5-methylcytosine"
aagcagaggtggcctttcagataggtatgctctgaaacagtgctgctttagccacactgtcgtgtagttttagtctctagtcagtattggagaatcagattaaggttatacaactagatgcg

SEQ ID NO: 21444 - DNA, 122 bp, Homo sapiens
  misc_feature (61)..(62): /note="This region represents a CpG dinucleotide"
  misc_feature (61)..(61): /note="Nucleotide may be methylated to form 5-methylcytosine"
tctaggtttgtgtaagttcactctgtgacactcacacagtaatgacattgcctaatgacacgtttctcaggatgtatccctgttgttaggcgacgtgtgactgtactgtacactctgatggt

SEQ ID NO: 21445 - DNA, 122 bp, Homo sapiens
  misc_feature (61)..(62): /note="This region represents a CpG dinucleotide"
  misc_feature (61)..(61): /note="Nucleotide may be methylated to form 5-methylcytosine"
gctacccaaagcaacgacttcaatcaccacaactgaaatgattgtcattcccctgaaacacgacaggaaccgcccaataaatgaagacattggacttttttatggatgtaatagtcacagct

SEQ ID NO: 21446 - DNA, 122 bp, Homo sapiens
  misc_feature (61)..(62): /note="This region represents a CpG dinucleotide"
  misc_feature (61)..(61): /note="Nucleotide may be methylated to form 5-methylcytosine"
gatcacacagctagtaaaactaaaactaaactcggctaatcaggctctaaagtctgtgcccgtagcctcacaatatgctgcccattgaaatcagacagacagatgagatgtggtatgacctc

SEQ ID NO: 21447 - DNA, 122 bp, Homo sapiens
  misc_feature (61)..(62): /note="This region represents a CpG dinucleotide"
  misc_feature (61)..(61): /note="Nucleotide may be methylated to form 5-methylcytosine"
gggcaataaaattcaatctgtgacctattaaacctcacctgatgtaaattactaagagaacgtgcttaataggcaagattcagggcagtcttaaatacttattgctttactttccaggctaa

SEQ ID NO: 21448 - DNA, 122 bp, Homo sapiens
  misc_feature (61)..(62): /note="This region represents a CpG dinucleotide"
  misc_feature (61)..(61): /note="Nucleotide may be methylated to form 5-methylcytosine"
tttgtaccaaggtctggaaatgactcatagcacttctattttctgttaagaatctagtcacgtggccacacctggtaatcaccagctgagtagccatgtgcccagatgccattttactatta

SEQ ID NO: 21449 - DNA, 122 bp, Homo sapiens
  misc_feature (61)..(62): /note="This region represents a CpG dinucleotide"
  misc_feature (61)..(61): /note="Nucleotide may be methylated to form 5-methylcytosine"
aacatgatcttatttaatcctcatgctcattcattttacagaagagggatctaaggctcacggtggttaatcaacttgtccaaggtcacatagctagaaaaataaagatgttcaaaccagaa

SEQ ID NO: 21450 - DNA, 122 bp, Homo sapiens
  misc_feature (61)..(62): /note="This region represents a CpG dinucleotide"
  misc_feature (61)..(61): /note="Nucleotide may be methylated to form 5-methylcytosine"
agggtacagtctccaaaacaagggagtaaacatggagaaaagaagaaatgggactcactacgatgccaaaaaaggagagatgaaggacttcacagtagctcacaagtttgggctggaaagca

SEQ ID NO: 21451 - DNA, 122 bp, Homo sapiens
  misc_feature (61)..(62): /note="This region represents a CpG dinucleotide"
  misc_feature (61)..(61): /note="Nucleotide may be methylated to form 5-methylcytosine"
caaagttttgagtgattcacccaaagttttgtggctaataaaactccattccagcccaggcgcagtggctcatgcctgtaatcccaacacttcgggaggccgaggcaggcagatcacttgag

SEQ ID NO: 21452 - DNA, 122 bp, Homo sapiens
  misc_feature (61)..(62): /note="This region represents a CpG dinucleotide"
  misc_feature (61)..(61): /note="Nucleotide may be methylated to form 5-methylcytosine"
tcagatgagggaaacaggcccacgcagtggtcatgatgtggctgcatcttcaagagcggccgcccaggggcgcaggagcatgggctgtggcggcctggaccccaggcatgttttgtggccct

SEQ ID NO: 21453 - DNA, 122 bp, Homo sapiens
  misc_feature (61)..(62): /note="This region represents a CpG dinucleotide"
  misc_feature (61)..(61): /note="Nucleotide may be methylated to form 5-methylcytosine"
cttgaccaagtttggctctgggtatgatttatctgtggctgatgtggtattccccatagacggcaacaatgattgagaatctggttttgtcatctgtccatttggtgatctcttggataaca

SEQ ID NO: 21454 - DNA, 122 bp, Homo sapiens
  misc_feature (61)..(62): /note="This region represents a CpG dinucleotide"
  misc_feature (61)..(61): /note="Nucleotide may be methylated to form 5-methylcytosine"
cttgagaagacctgggccacatggaaaaactgttgcaactgataccaaagtttgtgtcatcgaatttcaaaacaattctctgcagtgtacaaagccagaaagagaaaccagcctcattcatg

SEQ ID NO: 21455 - DNA, 122 bp, Homo sapiens
  misc_feature (61)..(62): /note="This region represents a CpG dinucleotide"
  misc_feature (61)..(61): /note="Nucleotide may be methylated to form 5-methylcytosine"
tgatgaataattatgaaacagttacaatataagagaactccatttttaaagagcagagtccgatgagctacaagtcttctaaaatatgattgtatcttggtagcaaagctaacattagagaa

SEQ ID NO: 21456 - DNA, 122 bp, Homo sapiens
  misc_feature (61)..(62): /note="This region represents a CpG dinucleotide"
  misc_feature (61)..(61): /note="Nucleotide may be methylated to form 5-methylcytosine"
acatcctgcagttctactccctgggatctacacaagagaactaacacagaatctcagaaacgtgcacatgaatgttcccagcagcattattcatagtagccaaaacaacccagataaatgga

SEQ ID NO: 21457 - DNA, 122 bp, Homo sapiens
  misc_feature (61)..(62): /note="This region represents a CpG dinucleotide"
  misc_feature (61)..(61): /note="Nucleotide may be methylated to form 5-methylcytosine"
tcagcttgtcctctgatgcatttgttcacctcattgtactaaaacacaaagaaactgtctcgtataaaaatcagaaggaagtttagaaatcagaaagaagtttagaaaagtttagaaatcag

SEQ ID NO: 21458 - DNA, 122 bp, Homo sapiens
  misc_feature (61)..(62): /note="This region represents a CpG dinucleotide"
  misc_feature (61)..(61): /note="Nucleotide may be methylated to form 5-methylcytosine"
gtctcaaacacacacacacacacacacacacacacacatacacacacacacacacacacacgtctttggatttggagcttacttggataatcccggatgatcttatcttgagatcctgacct

SEQ ID NO: 21459 - DNA, 122 bp, Homo sapiens
  misc_feature (61)..(62): /note="This region represents a CpG dinucleotide"
  misc_feature (61)..(61): /note="Nucleotide may be methylated to form 5-methylcytosine"
acacttctgtgaaatggtactgcactttgccacaccatatgggtggggaccatacatgatcgcttccagtctcatgccaaacgtggcacagaaacttcattccttatttttattttctgatt

SEQ ID NO: 21460 - DNA, 122 bp, Homo sapiens
  misc_feature (61)..(62): /note="This region represents a CpG dinucleotide"
  misc_feature (61)..(61): /note="Nucleotide may be methylated to form 5-methylcytosine"
cattacataaatgtaactattgtttgaaattaggacatctctccattaaaaaaaaaaagtcggttttattagtgatgaggctgataggaaaacatggctttcaatgtgagccagttaggttt

SEQ ID NO: 21461 - DNA, 122 bp, Homo sapiens
  misc_feature (61)..(62): /note="This region represents a CpG dinucleotide"
  misc_feature (61)..(61): /note="Nucleotide may be methylated to form 5-methylcytosine"
gagaccgtctgggtttgtgtaagtcaactccaagacgttcacacagtgacaaaatcgcctcgtcatgcatttctcagagtgtgtccctgtcgctaagcgatgtgtgactgtttatatctgtg

SEQ ID NO: 21462 - DNA, 122 bp, Homo sapiens
  misc_feature (61)..(62): /note="This region represents a CpG dinucleotide"
  misc_feature (61)..(61): /note="Nucleotide may be methylated to form 5-methylcytosine"
atgaagagcttttgataagctgtaagaacctcacaacatacagacacttcctaacaacagcgtgctttcctctggaaaaggaaccagagacacaaagcagttgatgctgttcatgttctggg

SEQ ID NO: 21463 - DNA, 122 bp, Homo sapiens
  misc_feature (61)..(62): /note="This region represents a CpG dinucleotide"
  misc_feature (61)..(61): /note="Nucleotide may be methylated to form 5-methylcytosine"
ctctctagctgttttccttcactaatatttccaaaacacacaacaacagttggcatcgctcgcatataaacagctcttccatgtcactgagaaaacgagcaagatccagggaggaaaaatgg

SEQ ID NO: 21464 - DNA, 122 bp, Homo sapiens
  misc_feature (61)..(62): /note="This region represents a CpG dinucleotide"
  misc_feature (61)..(61): /note="Nucleotide may be methylated to form 5-methylcytosine"
attgactgcagcagtattcaggtaggagatgaacgggacttattttcccagcaccaatcacgagcctgatgatcaaaacaggatgcagtgaagaaaccggtggaaaccaccacatggtgaca

SEQ ID NO: 21465 - DNA, 122 bp, Homo sapiens
  misc_feature (61)..(62): /note="This region represents a CpG dinucleotide"
  misc_feature (61)..(61): /note="Nucleotide may be methylated to form 5-methylcytosine"
ttttgaactctatggggcttctgttctgtgccatgaacatgacacctgtgtcctctgttacgttcttgtgattgctcctgtttcatatattcctgtcttctcttctgactaggtttaaagaa

SEQ ID NO: 21466 - DNA, 122 bp, Homo sapiens
  misc_feature (61)..(62): /note="This region represents a CpG dinucleotide"
  misc_feature (61)..(61): /note="Nucleotide may be methylated to form 5-methylcytosine"
cccattatggagattaaccacttttcatcaggtttttaacttaagtcgtgaggaatacaacggtgaacacaaggtgtgtatgtgaattaatttagtagtaaactatgacatggaggggttct

SEQ ID NO: 21467 - DNA, 122 bp, Homo sapiens
  misc_feature (61)..(62): /note="This region represents a CpG dinucleotide"
  misc_feature (61)..(61): /note="Nucleotide may be methylated to form 5-methylcytosine"
tctgcggggtcactcagtctaacatctttatttacagatgaaggaaactccagagagggacgtgacttgccccaggtcccacacagcacagggctgaccagaactggggggacttgggcaca

SEQ ID NO: 21468 - DNA, 122 bp, Homo sapiens
  misc_feature (61)..(62): /note="This region represents a CpG dinucleotide"
  misc_feature (61)..(61): /note="Nucleotide may be methylated to form 5-methylcytosine"
taacttatgatgttaacacgtgtgttaaactaaaattgaaaaattaaatatcaaagtaaacggatatgtggcagataatattttttaaatagccacagcaatatttctagttccacctggtc

SEQ ID NO: 21469 - DNA, 122 bp, Homo sapiens
  misc_feature (61)..(62): /note="This region represents a CpG dinucleotide"
  misc_feature (61)..(61): /note="Nucleotide may be methylated to form 5-methylcytosine"
ttctctgtccagctttattggtcacacttgcagttagactggtctggccgatggccacaccgcggatgaggaatgtgatggtgtagttgtcaagggcttcatcaagggccctgaaacagagg

SEQ ID NO: 21470 - DNA, 122 bp, Homo sapiens
  misc_feature (61)..(62): /note="This region represents a CpG dinucleotide"
  misc_feature (61)..(61): /note="Nucleotide may be methylated to form 5-methylcytosine"
ccttggcttaggtgaggtcttagttacggctctgtgtcctcccaccattacgttctcatgcgatttatgacacgcctctcccctgaattctgatctttatatgttatcactgcgtcctctga

SEQ ID NO: 21471 - DNA, 122 bp, Homo sapiens
  misc_feature (61)..(62): /note="This region represents a CpG dinucleotide"
  misc_feature (61)..(61): /note="Nucleotide may be methylated to form 5-methylcytosine"
agaatctagacatgtgttaatgacaaatattattattcagattatatttacttttcaaatcgcaaaggaaaagaccataaaaaggcctggagcatgaaaataaccataggctaccttcctaa

SEQ ID NO: 21472 - DNA, 122 bp, Homo sapiens
  misc_feature (61)..(62): /note="This region represents a CpG dinucleotide"
  misc_feature (61)..(61): /note="Nucleotide may be methylated to form 5-methylcytosine"
agcttccatttcctcctgtgtaaaagcagactgttaaaaccgctacttcctaaaggctgtcgtgggaattaaagtatgacacatgcttatctcagtgtctagcacagggaagcatcaataaa

SEQ ID NO: 21473 - DNA, 122 bp, Homo sapiens
  misc_feature (61)..(62): /note="This region represents a CpG dinucleotide"
  misc_feature (61)..(61): /note="Nucleotide may be methylated to form 5-methylcytosine"
gaggggaaggaatctactggtcagcatatgaacatgtccggacacatcattcactgagtacgtggctacctggggtttagtaacaacttaggtgggactctcatctgatgccctgaggctgc

SEQ ID NO: 21474 - DNA, 122 bp, Homo sapiens
  misc_feature (61)..(62): /note="This region represents a CpG dinucleotide"
  misc_feature (61)..(61): /note="Nucleotide may be methylated to form 5-methylcytosine"
tgtgccctgaccactcagctacaggtctgacaccaacctgtgcctccatcatggtaactacggtagcgcctctctccagcacttgtgaggagccagaacaacattcttaacacacctggcat

SEQ ID NO: 21475 - DNA, 122 bp, Homo sapiens
  misc_feature (61)..(62): /note="This region represents a CpG dinucleotide"
  misc_feature (61)..(61): /note="Nucleotide may be methylated to form 5-methylcytosine"
tgagggcagggattatgacatattcatctccaggtccctttggcctaatttagggactgacgtgtcatagccagtaaatgttggttggattggattgaatggtaataaagagcattttctta

SEQ ID NO: 21476 - DNA, 122 bp, Homo sapiens
  misc_feature (61)..(62): /note="This region represents a CpG dinucleotide"
  misc_feature (61)..(61): /note="Nucleotide may be methylated to form 5-methylcytosine"
agtagcaaccgtgtaaatccaattactcctaagtgaattaagcttaccctagcctgacagcgtttgtcagtgcttgagcacactgcacagtatatgagaaacagcttgtaaataatattcct

SEQ ID NO: 21477 - DNA, 122 bp, Homo sapiens
  misc_feature (61)..(62): /note="This region represents a CpG dinucleotide"
  misc_feature (61)..(61): /note="Nucleotide may be methylated to form 5-methylcytosine"
ggggaaacaagatcagaagcttcacatataaatcagagtgatggacagagccctaattcccggggaggtcaggtcaaatatacttggctgaaagccaaagtatgtacaacctccatgagtcc

SEQ ID NO: 21478 - DNA, 122 bp, Homo sapiens
  misc_feature (61)..(62): /note="This region represents a CpG dinucleotide"
  misc_feature (61)..(61): /note="Nucleotide may be methylated to form 5-methylcytosine"
aatggaacacaggaaataaccatatgtgaaccagagatctaaatcaaccaagttaacagacggggcctgacaggttccagataatctgtagagtcttaagttgtcttgaccatgagcaggtt

SEQ ID NO: 21479 - DNA, 122 bp, Homo sapiens
  misc_feature (61)..(62): /note="This region represents a CpG dinucleotide"
  misc_feature (61)..(61): /note="Nucleotide may be methylated to form 5-methylcytosine"
actaaccagaatccaaaaacgagtcacacagtgtctctagtcccctccttccctgctgtccgtatcagtcagctttcatagcagaaggaaatctggtttttaaaattttgctactaactggg

SEQ ID NO: 21480 - DNA, 122 bp, Homo sapiens
  misc_feature (61)..(62): /note="This region represents a CpG dinucleotide"
  misc_feature (61)..(61): /note="Nucleotide may be methylated to form 5-methylcytosine"
agcgggcagacagacacaactctgagaatggggccggccaggcccaggccactcactccccggcccacggctgcttgccattacagttcaaccaaagcctggcagcagccgtcaaaggattc

SEQ ID NO: 21481 - DNA, 122 bp, Homo sapiens
  misc_feature (61)..(62): /note="This region represents a CpG dinucleotide"
  misc_feature (61)..(61): /note="Nucleotide may be methylated to form 5-methylcytosine"
ggccagattcggcatcgggcatgctggtttgcatctctgccctgtcattgttcttgctttcggaaaggagtgtgctagttacaggcataagacagtgactctagttccccttcatgaaagca

SEQ ID NO: 21482 - DNA, 122 bp, Homo sapiens
  misc_feature (61)..(62): /note="This region represents a CpG dinucleotide"
  misc_feature (61)..(61): /note="Nucleotide may be methylated to form 5-methylcytosine"
ctcctgacgtgcagcttgatctgcacgtcacagtccataacaaattccaaatcagaatgtcgctgtgctggagatccctccgtcccagggtgtgcccagccttgggggttccagcaccgtcc

SEQ ID NO: 21483 - DNA, 122 bp, Homo sapiens
  misc_feature (61)..(62): /note="This region represents a CpG dinucleotide"
  misc_feature (61)..(61): /note="Nucleotide may be methylated to form 5-methylcytosine"
cccctccaagatttttctaattctctgaaactaagttccgcttcgaccctacccaggccacgtggtactttcttgtcaatggtttcttgctgagaacgggctgaccactgccaggcagacag

SEQ ID NO: 21484 - DNA, 122 bp, Homo sapiens
  misc_feature (61)..(62): /note="This region represents a CpG dinucleotide"
  misc_feature (61)..(61): /note="Nucleotide may be methylated to form 5-methylcytosine"
agtgtaagccctgctgtcggtcccgccggtggctgccctctgcctcccccgcacactccgcgcattgtttgggactgtcgggaagacgcctcgcacctcacaaatcatttaagcacctcagt

SEQ ID NO: 21485 - DNA, 122 bp, Homo sapiens
  misc_feature (61)..(62): /note="This region represents a CpG dinucleotide"
  misc_feature (61)..(61): /note="Nucleotide may be methylated to form 5-methylcytosine"
tatcttccatttctttcctcatgtttgtgttttcctttaaatccctgagcacattcataacgattgtcttatgtcttaatctgctaattccatcatctttgtcacacttgtgtctgtttcta

SEQ ID NO: 21486 - DNA, 122 bp, Homo sapiens
  misc_feature (61)..(62): /note="This region represents a CpG dinucleotide"
  misc_feature (61)..(61): /note="Nucleotide may be methylated to form 5-methylcytosine"
ggctggagatacagtgaaacaccttgcttaagtttgtcaatacaccctgcctctgactgacggtaggatgccaaggttcttggttgttcaggcaagcctactataccagcagcctgctgggg

SEQ ID NO: 21487 - DNA, 122 bp, Homo sapiens
  misc_feature (61)..(62): /note="This region represents a CpG dinucleotide"
  misc_feature (61)..(61): /note="Nucleotide may be methylated to form 5-methylcytosine"
ccctggtgcaaaatagaaaacaggactcctacaggagtatccagctcaatctgtagtggacgcagtgttgctcagtggctcccctagtggccaaattcccccaaaatgactcttctatctgt

SEQ ID NO: 21488 - DNA, 122 bp, Homo sapiens
  misc_feature (61)..(62): /note="This region represents a CpG dinucleotide"
  misc_feature (61)..(61): /note="Nucleotide may be methylated to form 5-methylcytosine"
gggcaaatggcaagccctcatttatattagttatgttcaccatttcttataaccccatgacgcaggcaccattattataatcatgttacaggagaggaaactgattatcagagaggatagca

SEQ ID NO: 21489 - DNA, 122 bp, Homo sapiens
  misc_feature (61)..(62): /note="This region represents a CpG dinucleotide"
  misc_feature (61)..(61): /note="Nucleotide may be methylated to form 5-methylcytosine"
tgtagtcaagacacaataatttctttttaaggatgtttacttttctagttagtaaatgtacgggatggttttcactaaaacataagtcagccagctgtttgtttgggttcttaaactgaatg

SEQ ID NO: 21490 - DNA, 122 bp, Homo sapiens
  misc_feature (61)..(62): /note="This region represents a CpG dinucleotide"
  misc_feature (61)..(61): /note="Nucleotide may be methylated to form 5-methylcytosine"
tcaagacttttggcccaaaatttcagtggggagtgtggcctacatgccagtcttctcagccgtagcctcccacaagggcagggtgagtgacagcacaccaatctcctggcacagtaataaca

SEQ ID NO: 21491 - DNA, 122 bp, Homo sapiens
  misc_feature (61)..(62): /note="This region represents a CpG dinucleotide"
  misc_feature (61)..(61): /note="Nucleotide may be methylated to form 5-methylcytosine"
cgagtttatattatgaataaaaggacctaagttgctttttctaaaactgctaatagcgtgcgtttaaaacattccctttttcagcagttatatttactatttttatactacacaatagtcta

SEQ ID NO: 21492 - DNA, 122 bp, Homo sapiens
  misc_feature (61)..(62): /note="This region represents a CpG dinucleotide"
  misc_feature (61)..(61): /note="Nucleotide may be methylated to form 5-methylcytosine"
acctgctccccctctgacacgtccctgactgctctacctatcctcgctccactcatgtcacgtgtcatgaacacgtgctaggcacagtctcacctcaggggctttgcatgtgctcttctcac

SEQ ID NO: 21493 - DNA, 122 bp, Homo sapiens
  misc_feature (61)..(62): /note="This region represents a CpG dinucleotide"
  misc_feature (61)..(61): /note="Nucleotide may be methylated to form 5-methylcytosine"
ttgctcagtggagcaggcagatgttcttgttccaaaaggttcactagccatgcagctccccgtctcttcaaagctgcggagagagtgactctccgatgagtcacagctgcttctttgctgat

SEQ ID NO: 21494 - DNA, 122 bp, Homo sapiens
  misc_feature (61)..(62): /note="This region represents a CpG dinucleotide"
  misc_feature (61)..(61): /note="Nucleotide may be methylated to form 5-methylcytosine"
ccgcgcccgcccacatctcttcttacaggtcaactggctttccttgacacccagttacttcgttcttcaggtgttgcaaaactcatcagcaagcacctaggcaattactgttcaaaatatct

SEQ ID NO: 21495 - DNA, 122 bp, Homo sapiens
  misc_feature (61)..(62): /note="This region represents a CpG dinucleotide"
  misc_feature (61)..(61): /note="Nucleotide may be methylated to form 5-methylcytosine"
ttcatactatatggcactcccaccagcaccatgacagctgaaaatcaccatgacaatgaccggaagaggccataaaaagacaaaaaggaaagcagcactgcgattcaccatcaattgtgaaa

SEQ ID NO: 21496 - DNA, 122 bp, Homo sapiens
  misc_feature (61)..(62): /note="This region represents a CpG dinucleotide"
  misc_feature (61)..(61): /note="Nucleotide may be methylated to form 5-methylcytosine"
gttgcagcaagtcagcaaaaagggctatgatgaccaggcagcattgagcaactctgactccgccttcccctcttcgcacaccttctggttactgaaaacccagcgttagtagaaaagtttct

SEQ ID NO: 21497 - DNA, 122 bp, Homo sapiens
  misc_feature (61)..(62): /note="This region represents a CpG dinucleotide"
  misc_feature (61)..(61): /note="Nucleotide may be methylated to form 5-methylcytosine"
catgcattaatattggggctccccgagagttattcatacatcttcatgacagtcctaatacgtcaattctaagtgctttgctcttctcttgctctctctgttgagggacccagtgctcccct

SEQ ID NO: 21498 - DNA, 122 bp, Homo sapiens
  misc_feature (61)..(62): /note="This region represents a CpG dinucleotide"
  misc_feature (61)..(61): /note="Nucleotide may be methylated to form 5-methylcytosine"
ccggggctatataatagagataatgaccacaaactcaagataaattcttatgcgcccagccggtcaattcttttttatttaagagagtgagcctgaagggtgagcctcatcccctcccctcc

SEQ ID NO: 21499 - DNA, 122 bp, Homo sapiens
  misc_feature (61)..(62): /note="This region represents a CpG dinucleotide"
  misc_feature (61)..(61): /note="Nucleotide may be methylated to form 5-methylcytosine"
tgagttcaggagtctgcttcgcccttatgggtgtggtcatgcttaaggacagaggaagcacgcagtggcattcacttttgccctggaggttatctgagcagagagaatatctcacaaactaa

SEQ ID NO: 21500 - DNA, 122 bp, Homo sapiens
  misc_feature (61)..(62): /note="This region represents a CpG dinucleotide"
  misc_feature (61)..(61): /note="Nucleotide may be methylated to form 5-methylcytosine"
tcaaacacagccctttccatatgaaactcaggcctctacagtgtggtcaatctggttagccgcctgataccgaattctcagcaagtgcaaacattaatcttaagacatacagtactttagtg

SEQ ID NO: 21501 - DNA, 122 bp, Homo sapiens
  misc_feature (61)..(62): /note="This region represents a CpG dinucleotide"
  misc_feature (61)..(61): /note="Nucleotide may be methylated to form 5-methylcytosine"
gttcaggactgagggccagggacgggccacaggctccctgcctggggtccaagcctagatcgctcgctccccacccgcaccaaagcccaggcaaagggtgcttcagccacttcctgttgcag

SEQ ID NO: 21502 - DNA, 122 bp, Homo sapiens
  misc_feature (61)..(62): /note="This region represents a CpG dinucleotide"
  misc_feature (61)..(61): /note="Nucleotide may be methylated to form 5-methylcytosine"
tctggggctgggactgggacagtgacaatgactgggatagtgctgtgctggccctcctggcgctggctgtggtggctgccacagcgctggccttacactggtttggctccgggcacgatcaa

SEQ ID NO: 21503 - DNA, 122 bp, Homo sapiens
  misc_feature (61)..(62): /note="This region represents a CpG dinucleotide"
  misc_feature (61)..(61): /note="Nucleotide may be methylated to form 5-methylcytosine"
gcctgtcccttgacgccctgcatcctcctccctgactcgcagccccatcggacgctctcccgggaccgccgcaggaccagtttccatagactgcggactggggtcttcctccagcagttact

SEQ ID NO: 21504 - DNA, 122 bp, Homo sapiens
  misc_feature (61)..(62): /note="This region represents a CpG dinucleotide"
  misc_feature (61)..(61): /note="Nucleotide may be methylated to form 5-methylcytosine"
gcagggacgaggagcctgaggctcagagaggatgtcactcgctctgagtcacatgctgggcgtctcccctctacctggaggcatatacgcccaccagggatcatgggcagtggttgtcatgg

SEQ ID NO: 21505 - DNA, 122 bp, Homo sapiens
  misc_feature (61)..(62): /note="This region represents a CpG dinucleotide"
  misc_feature (61)..(61): /note="Nucleotide may be methylated to form 5-methylcytosine"
ggagaaagtggctatgagaattagagagacaaagggtgtgcttgtgggaatgggatgtaacgtcagagcaggttcaaccttacagctgtgcagtccagttagtcaaatattaatgagtcaat

SEQ ID NO: 21506 - DNA, 122 bp, Homo sapiens
  misc_feature (61)..(62): /note="This region represents a CpG dinucleotide"
  misc_feature (61)..(61): /note="Nucleotide may be methylated to form 5-methylcytosine"
tcccaaatgtcccaccttctttcctccctacacagtttcccaccactcgggtcagttaatcgtccccaccgtgacagatggcagctgaacccctagaccaactgccccctcactcccagact

SEQ ID NO: 21507 - DNA, 122 bp, Homo sapiens
  misc_feature (61)..(62): /note="This region represents a CpG dinucleotide"
  misc_feature (61)..(61): /note="Nucleotide may be methylated to form 5-methylcytosine"
gcattaataaattaagttttattggaacacagtcatgttcattcattcatctattgtctacggctgaggtttgtagttgaaatagagactttacggcctgccatgcctaaaatatttactat

SEQ ID NO: 21508 - DNA, 122 bp, Homo sapiens
  misc_feature (61)..(62): /note="This region represents a CpG dinucleotide"
  misc_feature (61)..(61): /note="Nucleotide may be methylated to form 5-methylcytosine"
gatgagccactgaggtaacccaggaagacatcacaaacacagaggccttcgctgcccttccgcagaacaccctgcttgctacccacaaaagcaccctttaatcggccatgagtcacatccat

SEQ ID NO: 21509 - DNA, 122 bp, Homo sapiens
  misc_feature (61)..(62): /note="This region represents a CpG dinucleotide"
  misc_feature (61)..(61): /note="Nucleotide may be methylated to form 5-methylcytosine"
tctgctaccccttggcccagagagctgggagtagggatggggaagccagaaggcagtgcacgattagacccatctggtatattctcagacagacagacagagggccccctaacggtaagcag

SEQ ID NO: 21510 - DNA, 122 bp, Homo sapiens
  misc_feature (61)..(62): /note="This region represents a CpG dinucleotide"
  misc_feature (61)..(61): /note="Nucleotide may be methylated to form 5-methylcytosine"
cattccgtgctgagattctgcatttctaacaagctggcaactgatgtccatggtgctgaccgttaagaacagtctcttggtaaaggggatgtagagcatttcaggcaggtgagcactgaaga

SEQ ID NO: 21511 - DNA, 122 bp, Homo sapiens
  misc_feature (61)..(62): /note="This region represents a CpG dinucleotide"
  misc_feature (61)..(61): /note="Nucleotide may be methylated to form 5-methylcytosine"
agctttggagctagatacagctatggagtcaggtagactgaactcacgtgtcagctcagccgtttttctagctttgtgaccttaggcaagttactcaacctctctgtttcctcatctattca

SEQ ID NO: 21512 - DNA, 122 bp, Homo sapiens
  misc_feature (61)..(62): /note="This region represents a CpG dinucleotide"
  misc_feature (61)..(61): /note="Nucleotide may be methylated to form 5-methylcytosine"
ctaacttcctgtgactgggctttcagatgttgatgttgatgatgtccctgccaggataaccggtccagattggccagctgtgagaataattcaagtgggtttcaggtaaatcactttctgat

SEQ ID NO: 21513 - DNA, 122 bp, Homo sapiens
  misc_feature (61)..(62): /note="This region represents a CpG dinucleotide"
  misc_feature (61)..(61): /note="Nucleotide may be methylated to form 5-methylcytosine"
cagatgtgatattctccatttttactggcattatcagtgaaactgtgtctgtaccatattcgttgactaacacatctttcaggtttcagtatgaataagctgcattctgcatgtatgttcag

SEQ ID NO: 21514 - DNA, 122 bp, Homo sapiens
  misc_feature (61)..(62): /note="This region represents a CpG dinucleotide"
  misc_feature (61)..(61): /note="Nucleotide may be methylated to form 5-methylcytosine"
tcctgtcctaccactgtttgtcttgctcattcctcaaacattgctgttctttcaacaagccgtgtttgttcctaccatctttgcacctgccctctgcctagaaagctcttctcctccatggt

SEQ ID NO: 21515 - DNA, 122 bp, Homo sapiens
  misc_feature (61)..(62): /note="This region represents a CpG dinucleotide"
  misc_feature (61)..(61): /note="Nucleotide may be methylated to form 5-methylcytosine"
tattatggaaggaagaggtctctctctctctccctctctttctctctctctctgtgtgaacgtgcaccaaagaaaggcatgtgaccatgttgcaagacgacaaatgtgtgcaagccagaaag

SEQ ID NO: 21516 - DNA, 122 bp, Homo sapiens
  misc_feature (61)..(62): /note="This region represents a CpG dinucleotide"
  misc_feature (61)..(61): /note="Nucleotide may be methylated to form 5-methylcytosine"
agaaactaaggtctttgccatttgactctactcatgctacggcagcagactgcatcttctcgctctttagtggtaatccacattgctgggtccctcccacttttcttaataaccactggcgg

SEQ ID NO: 21517 - DNA, 122 bp, Homo sapiens
  misc_feature (61)..(62): /note="This region represents a CpG dinucleotide"
  misc_feature (61)..(61): /note="Nucleotide may be methylated to form 5-methylcytosine"
cttgtctgtttagatttgctcagcaaaacttttactttgacactgtaatcccagatataccggagatgactaagctttcagtactcacaggcttaccatcttgaccaggttgtccagggtag

SEQ ID NO: 21518 - DNA, 122 bp, Homo sapiens
  misc_feature (61)..(62): /note="This region represents a CpG dinucleotide"
  misc_feature (61)..(61): /note="Nucleotide may be methylated to form 5-methylcytosine"
cccaaactgtggggtggacttttcgttctcagtaaatccttgcttttgctttccttgcttcgtttgtgtgttttctccaagatgccaagtacctggacaccttctactggtaacagctggag

SEQ ID NO: 21519 - DNA, 122 bp, Homo sapiens
  misc_feature (61)..(62): /note="This region represents a CpG dinucleotide"
  misc_feature (61)..(61): /note="Nucleotide may be methylated to form 5-methylcytosine"
aggctcctcttgaaagctcttgtgctcagctagctagtcattgtgactcagctctgcctgcgaagcgcctacagtctagttgagaaggtaaggtacataagtataactatattaaaaagcag

SEQ ID NO: 21520 - DNA, 122 bp, Homo sapiens
  misc_feature (61)..(62): /note="This region represents a CpG dinucleotide"
  misc_feature (61)..(61): /note="Nucleotide may be methylated to form 5-methylcytosine"
ttctctggctggacgctgctcaatccactgcctagcaggtggcccattccagttggagaacgtagtgagtctttcagtggagccagggtctggtaagtctcctagcagggtctgggggagag

SEQ ID NO: 21521 - DNA, 122 bp, Homo sapiens
  misc_feature (61)..(62): /note="This region represents a CpG dinucleotide"
  misc_feature (61)..(61): /note="Nucleotide may be methylated to form 5-methylcytosine"
cctggaagtctttgttcttaaccatccctgaggctgggtgctgtgtacagctcaggtcagcgtgcctgccccttttctttcttcttaataaggccagggaagtgagcacttctctgtccctc

SEQ ID NO: 21522 - DNA, 122 bp, Homo sapiens
  misc_feature (61)..(62): /note="This region represents a CpG dinucleotide"
  misc_feature (61)..(61): /note="Nucleotide may be methylated to form 5-methylcytosine"
aatgtcagagatcctgtctatagggacaacagggatgcaaacagtcagtaactagtgctacgtgatttttagcaacaaggaagtgaatcagagcacagcctggtgagtgcttaattatgact

SEQ ID NO: 21523 - DNA, 122 bp, Homo sapiens
  misc_feature (61)..(62): /note="This region represents a CpG dinucleotide"
  misc_feature (61)..(61): /note="Nucleotide may be methylated to form 5-methylcytosine"
tcactaactctggaggtgcagcccagcaatctggtttaacaaacctccaggtgattctgacgtacactaaagtttgagaaccactgctggggaatcatttgtagtttactccaggtttaggc

SEQ ID NO: 21524 - DNA, 122 bp, Homo sapiens
  misc_feature (61)..(62): /note="This region represents a CpG dinucleotide"
  misc_feature (61)..(61): /note="Nucleotide may be methylated to form 5-methylcytosine"
cgagcgggtgggtgcgcccggagccgccccgtcccccgccacccccaggcagtgggggtgcgttttaaggcccgccctagatggggggcagggtgcgccctctaccgccctccaaagcgccg

SEQ ID NO: 21525 - DNA, 122 bp, Homo sapiens
  misc_feature (61)..(62): /note="This region represents a CpG dinucleotide"
  misc_feature (61)..(61): /note="Nucleotide may be methylated to form 5-methylcytosine"
tctctcactgactgaagttcataccacaggaagtcacctccccaacacttctaggctgtgcgcccagaccctttggccaccttcaaagaagttggttcccaagacactggtaacagcactcg

SEQ ID NO: 21526 - DNA, 122 bp, Homo sapiens
  misc_feature (61)..(62): /note="This region represents a CpG dinucleotide"
  misc_feature (61)..(61): /note="Nucleotide may be methylated to form 5-methylcytosine"
cttgtctgtagctgtccttgaagtggtgtccactattcccctggatgaggttcattcttacgttctgttccataacctagttgtgttattaacttcccatcatacatccttttattaaaaat

SEQ ID NO: 21527 - DNA, 122 bp, Homo sapiens
  misc_feature (61)..(62): /note="This region represents a CpG dinucleotide"
  misc_feature (61)..(61): /note="Nucleotide may be methylated to form 5-methylcytosine"
gtttgggttacatccttgagaccctgtctcaactgacgagcatgtgagagtctggccactcgccctgtagggccagctcagaggggagcttggtgttctggagttgtcggtcaggggtgatg

SEQ ID NO: 21528 - DNA, 122 bp, Homo sapiens
  misc_feature (61)..(62): /note="This region represents a CpG dinucleotide"
  misc_feature (61)..(61): /note="Nucleotide may be methylated to form 5-methylcytosine"
caaacaaaaaataaaaagctgctaatgaccaaaatttattacagacttccccccaaccaccgaaagtatgccaatctgaattcctcagaaaagaacactttgtcaaacataaacgacagttt

SEQ ID NO: 21529 - DNA, 122 bp, Homo sapiens
  misc_feature (61)..(62): /note="This region represents a CpG dinucleotide"
  misc_feature (61)..(61): /note="Nucleotide may be methylated to form 5-methylcytosine"
atcattgccactggtggtacaatgctggtgccaagactgtgtgccaggctcgttgcttcgcgtccgttacttcatctcagcagacaactctcaatatccccattctacggatggggaaatga

SEQ ID NO: 21530 - DNA, 122 bp, Homo sapiens
  misc_feature (61)..(62): /note="This region represents a CpG dinucleotide"
  misc_feature (61)..(61): /note="Nucleotide may be methylated to form 5-methylcytosine"
ggtctgcagggggtggggaggggcagtgcagggggctccagccctcagctgcaggccaggcggacagggcaggacacagctgcctgattccagcccagcatcaaagcacccacatagcccag

SEQ ID NO: 21531 - DNA, 122 bp, Homo sapiens
  misc_feature (61)..(62): /note="This region represents a CpG dinucleotide"
  misc_feature (61)..(61): /note="Nucleotide may be methylated to form 5-methylcytosine"
ctgaccaaggggagaggctggaaggcagttttgccagctccaccgcctgtctttatgtgccgattcacgaagctaccttccttcttgcctttgatgtcagaaatccaaaagcgggtgagtaa

SEQ ID NO: 21532 - DNA, 122 bp, Homo sapiens
  misc_feature (61)..(62): /note="This region represents a CpG dinucleotide"
  misc_feature (61)..(61): /note="Nucleotide may be methylated to form 5-methylcytosine"
aaccagcaatggcaggttgagtcattcccatgtcacctgatggtgactctttcctgcttccgtcttctactcacggggacccctgtgatgactttgggagcacctggatgatccaggaaact

SEQ ID NO: 21533 - DNA, 122 bp, Homo sapiens
  misc_feature (61)..(62): /note="This region represents a CpG dinucleotide"
  misc_feature (61)..(61): /note="Nucleotide may be methylated to form 5-methylcytosine"
aatcactgtgccttgcatagatattaggcatagaaataagcctgccacaaagctctcctccgtgctgtggtgctcatggagccatgcagggcacagagacagcaaaactcagctggaggcct

SEQ ID NO: 21534 - DNA, 122 bp, Homo sapiens
  misc_feature (61)..(62): /note="This region represents a CpG dinucleotide"
  misc_feature (61)..(61): /note="Nucleotide may be methylated to form 5-methylcytosine"
attataaacttaataccttaaggggatgacagattgtgacatcacatacccacacacacacgagaaaaaactagcaccagtcaggctgtggctgcacacagctatctttgtttatcattgac

SEQ ID NO: 21535 - DNA, 122 bp, Homo sapiens
  misc_feature (61)..(62): /note="This region represents a CpG dinucleotide"
  misc_feature (61)..(61): /note="Nucleotide may be methylated to form 5-methylcytosine"
ctcattttacctcctgatgtggtttcagtgttcagtgacccttgtgattatgacagtaagcgttttctatgcatgtggtagaatgagatggctcaagtgaaaggttttccttgacataagat

SEQ ID NO: 21536 - DNA, 122 bp, Homo sapiens
  misc_feature (61)..(62): /note="This region represents a CpG dinucleotide"
  misc_feature (61)..(61): /note="Nucleotide may be methylated to form 5-methylcytosine"
acattaaacctaaccacattgctcaatgtaataactgcaggctgattaagttctctacaacgtattgtgctcaaactactgattgtcatagaatcatttagaatgcaaaactattttttccc

SEQ ID NO: 21537 - DNA, 122 bp, Homo sapiens
  misc_feature (61)..(62): /note="This region represents a CpG dinucleotide"
  misc_feature (61)..(61): /note="Nucleotide may be methylated to form 5-methylcytosine"
agaaagacccatgaaatgtcatactcttttgtgaaccagtaaattatattgatggaatgacgggtaaccaaagcccaacaagagctctttattcagcatgtgaaaaccacatgacccccaaa

SEQ ID NO: 21538 - DNA, 122 bp, Homo sapiens
  misc_feature (61)..(62): /note="This region represents a CpG dinucleotide"
  misc_feature (61)..(61): /note="Nucleotide may be methylated to form 5-methylcytosine"
gaccctattcctgcccacaggctagaggaggcaaagagtttcctgttgtattgacagcatcgtcttgggttacaaatagatttcacacggagacatatgcctacctgttcaaagtggctgaa

SEQ ID NO: 21539 - DNA, 122 bp, Homo sapiens
  misc_feature (61)..(62): /note="This region represents a CpG dinucleotide"
  misc_feature (61)..(61): /note="Nucleotide may be methylated to form 5-methylcytosine"
tcctggtcaaacaaccggtcatccttactaccttcggagtttccttgtggtgctgaaaaccgtacttgagaatgaagatgatatgttgctctttgatgagcaggagaagggaattgtaacta

SEQ ID NO: 21540 - DNA, 122 bp, Homo sapiens
  misc_feature (61)..(62): /note="This region represents a CpG dinucleotide"
  misc_feature (61)..(61): /note="Nucleotide may be methylated to form 5-methylcytosine"
caagtattgtttgttgttcctcctaagtatctttcaaatcaaccgctttgtctctccttacgtagacactattttgcaattcttgattgggcaatttagcagcctcctaaaccagtcactcc

SEQ ID NO: 21541 - DNA, 122 bp, Homo sapiens
  misc_feature (61)..(62): /note="This region represents a CpG dinucleotide"
  misc_feature (61)..(61): /note="Nucleotide may be methylated to form 5-methylcytosine"
gaagtgtgtttggcatgttttggaaagaggaagtgaaatctggagaacagtggtaggatacgaagggggcagatcatatcaggccttttagtgtaaggaacagatgttattctaagtaaaaa

SEQ ID NO: 21542 - DNA, 122 bp, Homo sapiens
  misc_feature (61)..(62): /note="This region represents a CpG dinucleotide"
  misc_feature (61)..(61): /note="Nucleotide may be methylated to form 5-methylcytosine"
gataaatgctttatttggtcaaaaactggaagctgacgctccacttaagagtctaggtcacgcggcaagccagacacttgaaggagcttaaagctttctgttcttaatagtattttagacac

SEQ ID NO: 21543 - DNA, 122 bp, Homo sapiens
  misc_feature (61)..(62): /note="This region represents a CpG dinucleotide"
  misc_feature (61)..(61): /note="Nucleotide may be methylated to form 5-methylcytosine"
ttatgtgggacaatatgataaaattatgtcagtgaaggtaacatcatttccttctcacaacggatgatgtcttaggtacttctcagggaaggggtggagcaagccatagccacaatgcagct

SEQ ID NO: 21544 - DNA, 122 bp, Homo sapiens
  misc_feature (61)..(62): /note="This region represents a CpG dinucleotide"
  misc_feature (61)..(61): /note="Nucleotide may be methylated to form 5-methylcytosine"
aggttgttagattggagcatcagatctggaaaacctagctcagtgctttaaaaacattaacgtgctgatgaatcaatgaatcacctgggagtcaggttaaaatccaggttctgatttagtaa

SEQ ID NO: 21545 - DNA, 122 bp, Homo sapiens
  misc_feature (61)..(62): /note="This region represents a CpG dinucleotide"
  misc_feature (61)..(61): /note="Nucleotide may be methylated to form 5-methylcytosine"
tgattttgctgaacaagaggtatatgtaggtgaggggagcagcgggtaggagtggacccacggaagtggtgggaaataagcctgaataatagacacaaatggcctattgtgcgagtgtggct

SEQ ID NO: 21546 - DNA, 122 bp, Homo sapiens
  misc_feature (61)..(62): /note="This region represents a CpG dinucleotide"
  misc_feature (61)..(61): /note="Nucleotide may be methylated to form 5-methylcytosine"
agtgatagaaaaaaaggactcaacctgctcttggtggctttgaaaatggagagaaggagccgtgagccagagaatgtgggtggcctttagaagagcaggaaaaaagaagcagattagtgtga

SEQ ID NO: 21547 - DNA, 122 bp, Homo sapiens
  misc_feature (61)..(62): /note="This region represents a CpG dinucleotide"
  misc_feature (61)..(61): /note="Nucleotide may be methylated to form 5-methylcytosine"
ctgtagccaacatcccctgagctgttgatgccctgtgaaatctctgtgaaatctctttctcgctgatcctacacatttggaaagtgctgtcatgacaattattactcacaaagttctcttgc

SEQ ID NO: 21548 - DNA, 122 bp, Homo sapiens
  misc_feature (61)..(62): /note="This region represents a CpG dinucleotide"
  misc_feature (61)..(61): /note="Nucleotide may be methylated to form 5-methylcytosine"
gtgcggtagcctagaggagcggcagacttctctttccccatcccccgccccatcacttgacgttgctgccggacctcggtacaaacccaagacaaaacggggccctttggaaaaagtgagat

SEQ ID NO: 21549 - DNA, 122 bp, Homo sapiens
  misc_feature (61)..(62): /note="This region represents a CpG dinucleotide"
  misc_feature (61)..(61): /note="Nucleotide may be methylated to form 5-methylcytosine"
aagagcatcctgcaaggacaggtgttaagtgtgaaccaaggaccatgactaatctagtgccgtgttatctgaggtccgagtgtaaataatatataaaaccacaagacacacagaacaggagt

SEQ ID NO: 21550 - DNA, 122 bp, Homo sapiens
  misc_feature (61)..(62): /note="This region represents a CpG dinucleotide"
  misc_feature (61)..(61): /note="Nucleotide may be methylated to form 5-methylcytosine"
agacattggaagaagaggccagttcctgggtggaggcctggcttgtcctgtagctccagacgtgccagtgtcaggactttcacatgacctggcctaagtcaggggtagtatacatggttctg

SEQ ID NO: 21551 - DNA, 122 bp, Homo sapiens
  misc_feature (61)..(62): /note="This region represents a CpG dinucleotide"
  misc_feature (61)..(61): /note="Nucleotide may be methylated to form 5-methylcytosine"
ctaaatatgaaactccattaacatcagtgttttctgactccactttggtgagtcattcaacgtaatcaggacttagaaatgagcaacagatgtgtcacattctttgagcagtgctcaaagaa

SEQ ID NO: 21552 - DNA, 122 bp, Homo sapiens
  misc_feature (61)..(62): /note="This region represents a CpG dinucleotide"
  misc_feature (61)..(61): /note="Nucleotide may be methylated to form 5-methylcytosine"
ggtttcacggggcttggatcagtttcaaccttgatatttcgtcttggctttcctgggccacgtggggagggtaagctagacgccacaccctcctgtggtatgtaggacttattttttcctgt

SEQ ID NO: 21553 - DNA, 122 bp, Homo sapiens
  misc_feature (61)..(62): /note="This region represents a CpG dinucleotide"
  misc_feature (61)..(61): /note="Nucleotide may be methylated to form 5-methylcytosine"
gtgacttccaagctaagtcataaaagtcactgtagcttccacttggtggctctcttggatcgcttgttctgagagaaaccagctgccgcatcacgaggactgtcaatcagctctatgtgggt

SEQ ID NO: 21554 - DNA, 122 bp, Homo sapiens
  misc_feature (61)..(62): /note="This region represents a CpG dinucleotide"
  misc_feature (61)..(61): /note="Nucleotide may be methylated to form 5-methylcytosine"
tcttgatatcttccagctcacatttctccattgtgcccatgaaaatatcctaatagacttcgtaataagccttgataaaaataaaaggacaccatgtcttatagcatttccttgattcagca

SEQ ID NO: 21555 - DNA, 122 bp, Homo sapiens
  misc_feature (61)..(62): /note="This region represents a CpG dinucleotide"
  misc_feature (61)..(61): /note="Nucleotide may be methylated to form 5-methylcytosine"
ggaactgtgtccactccaaacatctgtctatccctcaaatcctggcttttgcatcaccatcgccagttctggggaaaggtgtgttacctttcttctcagcaggctaattcagatgagagtca

SEQ ID NO: 21556 - DNA, 122 bp, Homo sapiens
  misc_feature (61)..(62): /note="This region represents a CpG dinucleotide"
  misc_feature (61)..(61): /note="Nucleotide may be methylated to form 5-methylcytosine"
tcccaggctcaagtggatcctcccactccagctacgtgggactataggcatgtgccagcacgtgcagctaatttttttttttttttgtagagatgaggtccttctttgttgcccaggctggt

SEQ ID NO: 21557 - DNA, 122 bp, Homo sapiens
  misc_feature (61)..(62): /note="This region represents a CpG dinucleotide"
  misc_feature (61)..(61): /note="Nucleotide may be methylated to form 5-methylcytosine"
acaaggagatacgttccctgccatggaggaagttggaccacgaccttgtttattgggttgcgtctgttttgtctatctccagaaagcatcaggactccaaaaaggaagaagaaaagaagaag

SEQ ID NO: 21558 - DNA, 122 bp, Homo sapiens
  misc_feature (61)..(62): /note="This region represents a CpG dinucleotide"
  misc_feature (61)..(61): /note="Nucleotide may be methylated to form 5-methylcytosine"
tgcccaagaaaaacattcccaaggaacctctgctcatccacccaaccaggaagggaaaggcgatgcccgtgaaaacattccattgaaattaaagccctgctgccagtcagcctctcccacaa

SEQ ID NO: 21559 - DNA, 122 bp, Homo sapiens
  misc_feature (61)..(62): /note="This region represents a CpG dinucleotide"
  misc_feature (61)..(61): /note="Nucleotide may be methylated to form 5-methylcytosine"
atgactagacacattatcttgagcaaattgcttcacttccttgtgttactgagaataaaacgaaataatgcttgctaagtttttagtccagtgcatggcaggagatggctgttctatgaaat

SEQ ID NO: 21560 - DNA, 122 bp, Homo sapiens
  misc_feature (61)..(62): /note="This region represents a CpG dinucleotide"
  misc_feature (61)..(61): /note="Nucleotide may be methylated to form 5-methylcytosine"
taaaagaaagcatttatgagcaagttcaaacttaacctaaacctgtgtctcgtctcatctcgtctcatctcttttcttttctttctttttttttttgagacagagtcttgctctgttgccca

SEQ ID NO: 21561 - DNA, 122 bp, Homo sapiens
  misc_feature (61)..(62): /note="This region represents a CpG dinucleotide"
  misc_feature (61)..(61): /note="Nucleotide may be methylated to form 5-methylcytosine"
gctgaaatgcatgtcagggtcaaggacaagttctgggaagctgggcgggccggcaggaagcgcagatacagtccctagggaggcagaggcggcaacagggagattcccgggactggcccatc

SEQ ID NO: 21562 - DNA, 122 bp, Homo sapiens
  misc_feature (61)..(62): /note="This region represents a CpG dinucleotide"
  misc_feature (61)..(61): /note="Nucleotide may be methylated to form 5-methylcytosine"
actgagtcatgagaccaactcagagaccacagatgcaaatgagccttgtggtttctggtacgctgcatacacatctggacctacccaggaagccacaagagggaccaagtccaaggtctagc

SEQ ID NO: 21563 - DNA, 122 bp, Homo sapiens
  misc_feature (61)..(62): /note="This region represents a CpG dinucleotide"
  misc_feature (61)..(61): /note="Nucleotide may be methylated to form 5-methylcytosine"
tggaactaccttcctcttgtctatcctggggtttagctactgatgatacaagcctcattgcgcctctccccaatatgtgggttatgacaagcaatggtggcttgctttaccaggagcatttg

SEQ ID NO: 21564 - DNA, 122 bp, Homo sapiens
  misc_feature (61)..(62): /note="This region represents a CpG dinucleotide"
  misc_feature (61)..(61): /note="Nucleotide may be methylated to form 5-methylcytosine"
ttgctttacaggcagtaggcattttatgggccatccctgcaagaaataaatgttagaaggcgccgcctccccattcttgccaaccaaggaacagagttatgggcggaaaagcagccccacct

SEQ ID NO: 21565 - DNA, 122 bp, Homo sapiens
  misc_feature (61)..(62): /note="This region represents a CpG dinucleotide"
  misc_feature (61)..(61): /note="Nucleotide may be methylated to form 5-methylcytosine"
attctattaaaactgggttcccatttcccctgaccatagttttttaactcaggcagaggacggtggttctgagctgtgctgtgatttctaataataaccattaccaccaaattctcatacca

SEQ ID NO: 21566 - DNA, 122 bp, Homo sapiens
  misc_feature (61)..(62): /note="This region represents a CpG dinucleotide"
  misc_feature (61)..(61): /note="Nucleotide may be methylated to form 5-methylcytosine"
gtcatactctacacagttttacaacttccttaaatgcacactacttaaaacactcatgcacgtgctttcacaaaatttaaatgcaatcatatagcacatataaaaagatagcaaaacccaga

SEQ ID NO: 21567 - DNA, 122 bp, Homo sapiens
  misc_feature (61)..(62): /note="This region represents a CpG dinucleotide"
  misc_feature (61)..(61): /note="Nucleotide may be methylated to form 5-methylcytosine"
tagtccattattagggaatggtaggccttgtcgccagggagagaattctaaacaaagccgcggtccttgtccttcagtagcagagttttccggggggctggactttgtacactgctggaact

SEQ ID NO: 21568 - DNA, 122 bp, Homo sapiens
  misc_feature (61)..(62): /note="This region represents a CpG dinucleotide"
  misc_feature (61)..(61): /note="Nucleotide may be methylated to form 5-methylcytosine"
ttcagtcacaggagaaatgaacacgtctgggtgctctgagtcatgggaacgtggtagggacggcatttactggtaaccacctgagaagtagtttcagccacaggagaaatgaacacatctga

SEQ ID NO: 21569 - DNA, 122 bp, Homo sapiens
  misc_feature (61)..(62): /note="This region represents a CpG dinucleotide"
  misc_feature (61)..(61): /note="Nucleotide may be methylated to form 5-methylcytosine"
atatagttggcatttttataggccatgtcggtgaggctcatgaacaggtaatctacccagcggagctggagccactgctgacagtaaagttccccgacttagcagtggctgggcaataatac

SEQ ID NO: 21570 - DNA, 122 bp, Homo sapiens
  misc_feature (61)..(62): /note="This region represents a CpG dinucleotide"
  misc_feature (61)..(61): /note="Nucleotide may be methylated to form 5-methylcytosine"
gccttgaaattattacgttgttatgtcaactaactccacactattttatcacgaaccttgcgcaagtctattggaattgtaaatattgaaacttcatcctcccctcctgagatggcattaag

SEQ ID NO: 21571 - DNA, 122 bp, Homo sapiens
  misc_feature (61)..(62): /note="This region represents a CpG dinucleotide"
  misc_feature (61)..(61): /note="Nucleotide may be methylated to form 5-methylcytosine"
gtttgttttattgcttagctaaccaaggcttttattagtccaccaaactgtaaattcagtcgtcttgtgagcactcagaaggttgtgtccaaataagcaaagtacttttcaggtctaagtga

SEQ ID NO: 21572 - DNA, 122 bp, Homo sapiens
  misc_feature (61)..(62): /note="This region represents a CpG dinucleotide"
  misc_feature (61)..(61): /note="Nucleotide may be methylated to form 5-methylcytosine"
tatagatcaagattaatatcaccagtggtatgacaagttgacatcctacgtttcctggcacgtcatcatttgtgtggtattcttgccaagaatactgtaactaagtctgatcaggaggaaat

SEQ ID NO: 21573 - DNA, 122 bp, Homo sapiens
  misc_feature (61)..(62): /note="This region represents a CpG dinucleotide"
  misc_feature (61)..(61): /note="Nucleotide may be methylated to form 5-methylcytosine"
tggtttaacctaaacatgccctgggcctttgcacattgcaacaccctgagttttctcattcgtctttggcaagtttttactgctatgatagagatgatgggaactactggggagtaagagga

SEQ ID NO: 21574 - DNA, 122 bp, Homo sapiens
  misc_feature (61)..(62): /note="This region represents a CpG dinucleotide"
  misc_feature (61)..(61): /note="Nucleotide may be methylated to form 5-methylcytosine"
tcatggccaaaaacttagttttcaagtttactctgggatccccttggccaagagcgtgtccgttcagttaatctaggggcttgggattttatttttattcctcaaatgtaacaaatttaaag

SEQ ID NO: 21575 - DNA, 122 bp, Homo sapiens
  misc_feature (61)..(62): /note="This region represents a CpG dinucleotide"
  misc_feature (61)..(61): /note="Nucleotide may be methylated to form 5-methylcytosine"
ccatcccagacctacaaaatcagaacgttccaaaatgtggcctcccaatctgtgctgtaacgagtcctccaggtaaacaaggaaagtttgtttccttgtttcctggtactgaggaaagtttg

SEQ ID NO: 21576 - DNA, 122 bp, Homo sapiens
  misc_feature (61)..(62): /note="This region represents a CpG dinucleotide"
  misc_feature (61)..(61): /note="Nucleotide may be methylated to form 5-methylcytosine"
gaggtgtggagggacaggcgcgggcgggagcccgggctgcgcagggcgctggagggctggcgcggttccgggttgggcgcgcctctgctgccctgcactccgcgccgccgtcgggcgcctgc

SEQ ID NO: 21577 - DNA, 122 bp, Homo sapiens
  misc_feature (61)..(62): /note="This region represents a CpG dinucleotide"
  misc_feature (61)..(61): /note="Nucleotide may be methylated to form 5-methylcytosine"
gaaggactttccaaccaaagggagtggtgggggcagggggaggcttctctctgaggatgtcgcaaaccaagggtacaggaaggaagggtgggaaccaatgttttgggtacagggggaagtgg

SEQ ID NO: 21578 - DNA, 122 bp, Homo sapiens
  misc_feature (61)..(62): /note="This region represents a CpG dinucleotide"
  misc_feature (61)..(61): /note="Nucleotide may be methylated to form 5-methylcytosine"
gagttgcagtctgatttatcctccagggctgtaaacaggcggggacactcgcagccttgccgggagtcacttttttttgctcttaaacttgccctgcagcttcctggctgccaccttgaaga

SEQ ID NO: 21579 - DNA, 122 bp, Homo sapiens
  misc_feature (61)..(62): /note="This region represents a CpG dinucleotide"
  misc_feature (61)..(61): /note="Nucleotide may be methylated to form 5-methylcytosine"
gttttactctcagtgcagggacaggtggtgccgagtgaaagcctgtggcagcaaccagcccgctcctgcacggtctcctaagctaattgtgcgcctgctttgggtctgaatggcggggactg

SEQ ID NO: 21580 - DNA, 122 bp, Homo sapiens
  misc_feature (61)..(62): /note="This region represents a CpG dinucleotide"
  misc_feature (61)..(61): /note="Nucleotide may be methylated to form 5-methylcytosine"
gaggcgcctgggaactatttgtctgttgtttgtatctttttttgtacagttttagtgagacggcaaggttggaatccttgctacaccatttactggctgtttgaccttcagtaaatcaatca

SEQ ID NO: 21581 - DNA, 122 bp, Homo sapiens
  misc_feature (61)..(62): /note="This region represents a CpG dinucleotide"
  misc_feature (61)..(61): /note="Nucleotide may be methylated to form 5-methylcytosine"
ttcagagcttccctccttcccatgagaggctgaacaattaattgccactttaaacaatagcgcattctttttttttttttttacagtaaacgttgggaacagctgcaagggagggaaggctg

SEQ ID NO: 21582 - DNA, 122 bp, Homo sapiens
  misc_feature (61)..(62): /note="This region represents a CpG dinucleotide"
  misc_feature (61)..(61): /note="Nucleotide may be methylated to form 5-methylcytosine"
tacattaaaaacacaccagcccagatgcaaaaggctgcagatcatatgattccattcatacgaaatgcccaggacaggcgaatccagagagacagacaggaggtgagcaattgccaggggct

SEQ ID NO: 21583 - DNA, 122 bp, Homo sapiens
  misc_feature (61)..(62): /note="This region represents a CpG dinucleotide"
  misc_feature (61)..(61): /note="Nucleotide may be methylated to form 5-methylcytosine"
cttgggtgtgacacaactctaacatgcaaatatagtccagttttgccaacagctacaactcgttggcttacctcgagaaaactaaggtgtccctttaatgaacaaattattttcagactagt

SEQ ID NO: 21584 - DNA, 122 bp, Homo sapiens
  misc_feature (61)..(62): /note="This region represents a CpG dinucleotide"
  misc_feature (61)..(61): /note="Nucleotide may be methylated to form 5-methylcytosine"
gccctttttcctacatctgcacagaaactggcactagcaggactgcaaccgaggcagactcgagaattagcagactctggctcaggcaggacaatagagcagcgggaaatttctttcaaggg

SEQ ID NO: 21585 - DNA, 122 bp, Homo sapiens
  misc_feature (61)..(62): /note="This region represents a CpG dinucleotide"
  misc_feature (61)..(61): /note="Nucleotide may be methylated to form 5-methylcytosine"
cctgccatgtgccaggcataggctgagcattctacatatatggtctttatgagagccctacgaagcaggtgctattttagtaaccctgtttaacagatgagtaaagaggtttagagagatga

SEQ ID NO: 21586 - DNA, 122 bp, Homo sapiens
  misc_feature (61)..(62): /note="This region represents a CpG dinucleotide"
  misc_feature (61)..(61): /note="Nucleotide may be methylated to form 5-methylcytosine"
tgcatgccaggcattgtgctgggcaccagggagacagcagtgaccatgtcagataaagcccgtgaggccatggagtttacagtctagtgagagaagggtaaacagtgaaataaaacaataaa

SEQ ID NO: 21587 - DNA, 122 bp, Homo sapiens
  misc_feature (61)..(62): /note="This region represents a CpG dinucleotide"
  misc_feature (61)..(61): /note="Nucleotide may be methylated to form 5-methylcytosine"
taaagtattttgagaggggaagtgaggcaggatagttagtcaaggaagtgaccatgttctcgggatgcagcattggtggtgacctcacagccaacacaataagccttggcattcacatcata

SEQ ID NO: 21588 - DNA, 122 bp, Homo sapiens
  misc_feature (61)..(62): /note="This region represents a CpG dinucleotide"
  misc_feature (61)..(61): /note="Nucleotide may be methylated to form 5-methylcytosine"
ccaagcaagccacagccagcatgtcagaaagcaagattcaagtcagggtccccttggcttcgactggctctactggatcaaacagctccagcggggacagaggcagcaggaaagagcttcct

SEQ ID NO: 21589 - DNA, 122 bp, Homo sapiens
  misc_feature (61)..(62): /note="This region represents a CpG dinucleotide"
  misc_feature (61)..(61): /note="Nucleotide may be methylated to form 5-methylcytosine"
gggccctatggagccaaagggagtaaacagaatagtactgttctgggttgttgagggattcggtgagattccctaggtaggttttggtcaacaagcaggcatttcataatcctctctacctc

SEQ ID NO: 21590 - DNA, 122 bp, Homo sapiens
  misc_feature (61)..(62): /note="This region represents a CpG dinucleotide"
  misc_feature (61)..(61): /note="Nucleotide may be methylated to form 5-methylcytosine"
ctttccgtttttaaaaatgtttactccccagggcagtgaacacctggtgcctctgtctagcgcaagaggtgaacgtttgccacttccgtttctttcctcctaccagacctgaccctcctttt

SEQ ID NO: 21591 - DNA, 122 bp, Homo sapiens
  misc_feature (61)..(62): /note="This region represents a CpG dinucleotide"
  misc_feature (61)..(61): /note="Nucleotide may be methylated to form 5-methylcytosine"
tcaagaacttgttcccaaaccagtggtgtcaagtaaaaattgcagaggagtggcaatgtgcgaaggtttcccaggtggcctggagactgcagacttaatgcttatgaaatggaagtctatag

SEQ ID NO: 21592 - DNA, 122 bp, Homo sapiens
  misc_feature (61)..(62): /note="This region represents a CpG dinucleotide"
  misc_feature (61)..(61): /note="Nucleotide may be methylated to form 5-methylcytosine"
acctctcaggattaggctgaaaacacttaataccagtctgggctgcttccctggaagagacgtggggctctgaagccctaaggtgcaggaaagaaggctccaccctgctctccaccttcttc

SEQ ID NO: 21593 - DNA, 122 bp, Homo sapiens
  misc_feature (61)..(62): /note="This region represents a CpG dinucleotide"
  misc_feature (61)..(61): /note="Nucleotide may be methylated to form 5-methylcytosine"
tttaatgatctgacaccacagggagctttacactaaaatcttcctgaagcctagtttctacgagtcatttggcaggggaagagtataaagacagataacaataaaggacactttattcatca

SEQ ID NO: 21594 - DNA, 122 bp, Homo sapiens
  misc_feature (61)..(62): /note="This region represents a CpG dinucleotide"
  misc_feature (61)..(61): /note="Nucleotide may be methylated to form 5-methylcytosine"
gccatgaatttgaagtgaaccagagggaggtggcagaagaagcttaatggggaatagttccggtagagaaatgaggcttaagatgaactaccctggcccttatgtgtcagagagaacggctt

SEQ ID NO: 21595 - DNA, 122 bp, Homo sapiens
  misc_feature (61)..(62): /note="This region represents a CpG dinucleotide"
  misc_feature (61)..(61): /note="Nucleotide may be methylated to form 5-methylcytosine"
caggccagctcatgtttttgcatctatgcattaccttcattcctcctgcaatagctacttcgttaatgaactcaagcaaaatctgagatggttgtgtaagaaaggctaattgatatcagtaa

SEQ ID NO: 21596 - DNA, 122 bp, Homo sapiens
  misc_feature (61)..(62): /note="This region represents a CpG dinucleotide"
  misc_feature (61)..(61): /note="Nucleotide may be methylated to form 5-methylcytosine"
aagctaaatgccagctcttcagtgagcaacaattcaggtacagaagttggcacagggaggcgccagcaaagagtggctggcccactggaacagagacccagaaaccaaactagacagtgaaa

SEQ ID NO: 21597 - DNA, 122 bp, Homo sapiens
  misc_feature (61)..(62): /note="This region represents a CpG dinucleotide"
  misc_feature (61)..(61): /note="Nucleotide may be methylated to form 5-methylcytosine"
aagtgtcataggctttataaactgttcatttaatccttccattctccttaagtggtgggtcgtaacagctgttcgcagtcatcctcttcaactccaaatgagaaacaaaagctcagtcagtg

SEQ ID NO: 21598 - DNA, 122 bp, Homo sapiens
  misc_feature (61)..(62): /note="This region represents a CpG dinucleotide"
  misc_feature (61)..(61): /note="Nucleotide may be methylated to form 5-methylcytosine"
agccaaaaggaaacattgctgagctgcccccagggtggctctctcaagattgtggaagggcgaacttaagaggatgttatttgcagctgggtacacctaaaacatgtcccaagtgaggaagc

SEQ ID NO: 21599 - DNA, 122 bp, Homo sapiens
  misc_feature (61)..(62): /note="This region represents a CpG dinucleotide"
  misc_feature (61)..(61): /note="Nucleotide may be methylated to form 5-methylcytosine"
aattctgtacttattggaactatattataactatttgtctgcatgtttgctctttttattcgtgaggcttggctgagaattcaacacatagtaaacatccagtagagtaaatgattaacctg

SEQ ID NO: 21600 - DNA, 122 bp, Homo sapiens
  misc_feature (61)..(62): /note="This region represents a CpG dinucleotide"
  misc_feature (61)..(61): /note="Nucleotide may be methylated to form 5-methylcytosine"
tgaataattggacagatccctgtggtctcttcagtaataacacaagtgactgcttattgtcgccttcttcctccatgcctggcttcctgtggtcactctgcaaagggctctgtagttgcaag

SEQ ID NO: 21601 - DNA, 122 bp, Homo sapiens
  misc_feature (61)..(62): /note="This region represents a CpG dinucleotide"
  misc_feature (61)..(61): /note="Nucleotide may be methylated to form 5-methylcytosine"
gctgagtttatctgctgcagtttggcacttcttgccctaagctttttgagacaaagattgcgaaggaaggagatgaggacaagggaatgaggaggcccaggaggtggagccaaagggataag

SEQ ID NO: 21602 - DNA, 122 bp, Homo sapiens
  misc_feature (61)..(62): /note="This region represents a CpG dinucleotide"
  misc_feature (61)..(61): /note="Nucleotide may be methylated to form 5-methylcytosine"
actctagtcagaatcagtattttaacaatggaagcaaactgggaaagctaagcagtctcgcgtctttacacacatggaaactatgaccatatatattatacttttccttaacattttacaaa

SEQ ID NO: 21603 - DNA, 122 bp, Homo sapiens
  misc_feature (61)..(62): /note="This region represents a CpG dinucleotide"
  misc_feature (61)..(61): /note="Nucleotide may be methylated to form 5-methylcytosine"
ccgccttctcatccgatcgcgttacccttaataaccatcgccctggcaggagaggggtgccgaattccgtctcctgcgtgcctgcgtgtgtaatgtgccgagcaagtgatcctaatgatgca

SEQ ID NO: 21604 - DNA, 122 bp, Homo sapiens
  misc_feature (61)..(62): /note="This region represents a CpG dinucleotide"
  misc_feature (61)..(61): /note="Nucleotide may be methylated to form 5-methylcytosine"
gtgtttgagggaagaaatcacataaaagcatagaaacctggctctgaacaaactgtgtagcgtgttggggaacagtcacatcagaactttagcttaaccgagttgttatatgtaaagtgctt

SEQ ID NO: 21605 - DNA, 122 bp, Homo sapiens
  misc_feature (61)..(62): /note="This region represents a CpG dinucleotide"
  misc_feature (61)..(61): /note="Nucleotide may be methylated to form 5-methylcytosine"
tatactgagctatttttataattatttcaaagattttatgtttcactatgcagttgacatcgaggccagcctctctggagtttaagaattagctaattcttccgttggaggagagggaagtc

SEQ ID NO: 21606 - DNA, 122 bp, Homo sapiens
  misc_feature (61)..(62): /note="This region represents a CpG dinucleotide"
  misc_feature (61)..(61): /note="Nucleotide may be methylated to form 5-methylcytosine"
tagtagtcagttttgcattggaaatatacagtcatgttgcttaacaacagagatatgttccgagaaatgtgtcatcagacagtgtagtcattgtgtgaacaccatagagtgtactcacacaa

SEQ ID NO: 21607 - DNA, 122 bp, Homo sapiens
  misc_feature (61)..(62): /note="This region represents a CpG dinucleotide"
  misc_feature (61)..(61): /note="Nucleotide may be methylated to form 5-methylcytosine"
ttgaactcctgacctcaagtgatccaccctcctcggcctccaaaatgctgagattacaggcgtgagctgccatacctggccagaactctgtattttaaaaggtaagacttcagatgcagaaa

SEQ ID NO: 21608 - DNA, 122 bp, Homo sapiens
  misc_feature (61)..(62): /note="This region represents a CpG dinucleotide"
  misc_feature (61)..(61): /note="Nucleotide may be methylated to form 5-methylcytosine"
gtagtttcttgtccttaaaattctttcctgttgtcaagctacctgaaacgtatttgtcctcgataccctaggggcagggtggctgataactaaggtgcctgggaaacacttcagaagcaagt

SEQ ID NO: 21609 - DNA, 122 bp, Homo sapiens
  misc_feature (61)..(62): /note="This region represents a CpG dinucleotide"
  misc_feature (61)..(61): /note="Nucleotide may be methylated to form 5-methylcytosine"
cacacacaagcaccagaattattcagactcactaatcttgcagtgctttgcttcgtgcttcgtgggtagcagtgatcaaccaagtcctgaacttttgactgttatttgagatgaagtagcca

SEQ ID NO: 21610 - DNA, 122 bp, Homo sapiens
  misc_feature (61)..(62): /note="This region represents a CpG dinucleotide"
  misc_feature (61)..(61): /note="Nucleotide may be methylated to form 5-methylcytosine"
agtggtggtgaatgaggcacaggaactgtgccccgatgatgacaatgatggtaatgacagcggctaccattgagcacctcctatgtgttaggcacagtactggggactttacatttgttatc

SEQ ID NO: 21611 - DNA, 122 bp, Homo sapiens
  misc_feature (61)..(62): /note="This region represents a CpG dinucleotide"
  misc_feature (61)..(61): /note="Nucleotide may be methylated to form 5-methylcytosine"
ctatctggcattaacgtgcactctgtcaccataagacttaacggtggcagatggcagttgcgttagcaaacattcagttctctctctttgattcttcccttaggattgaggaaggcctggcc

SEQ ID NO: 21612 - DNA, 122 bp, Homo sapiens
  misc_feature (61)..(62): /note="This region represents a CpG dinucleotide"
  misc_feature (61)..(61): /note="Nucleotide may be methylated to form 5-methylcytosine"
tttcttcacttggcttaaaggccacagcattctggtttgcctcctctgacacctcactgacgccgctcacactccttcactagcttctggttacttatctggcttcttaatgccagtgtgtc

SEQ ID NO: 21613 - DNA, 122 bp, Homo sapiens
  misc_feature (61)..(62): /note="This region represents a CpG dinucleotide"
  misc_feature (61)..(61): /note="Nucleotide may be methylated to form 5-methylcytosine"
caaacaagtaaattatttggcatgcaatcaggagtcgtatttctttggcataaataaggacgcacataaaatgtactaaaaggaccaatcttcaatggtccttaacattttgggggggccac

SEQ ID NO: 21614 - DNA, 122 bp, Homo sapiens
  misc_feature (61)..(62): /note="This region represents a CpG dinucleotide"
  misc_feature (61)..(61): /note="Nucleotide may be methylated to form 5-methylcytosine"
gccccagggagctgttctttctagatcactgggctgcacccaagtattggagtaaggtaccgcagtcactcagtcactctgctgtaccaagctcctctttctttaggcacacctcctggagc

SEQ ID NO: 21615 - DNA, 122 bp, Homo sapiens
  misc_feature (61)..(62): /note="This region represents a CpG dinucleotide"
  misc_feature (61)..(61): /note="Nucleotide may be methylated to form 5-methylcytosine"
acagccttgggcctgtttttgcaaatgaggttctgacaggcggccacacccattcatttacgtatagtacgtggctgctttcatgcctccaggcccaggtgagtagttggaacagagacttt

SEQ ID NO: 21616 - DNA, 122 bp, Homo sapiens
  misc_feature (61)..(62): /note="This region represents a CpG dinucleotide"
  misc_feature (61)..(61): /note="Nucleotide may be methylated to form 5-methylcytosine"
tgccacctgcttcttagcatcaatatgctaaggacagacacactgacttgatctctgctccgtaaacacaaccacccttaattccctgcctctcccagctgagtcattgtactcactggctc

SEQ ID NO: 21617 - DNA, 122 bp, Homo sapiens
  misc_feature (61)..(62): /note="This region represents a CpG dinucleotide"
  misc_feature (61)..(61): /note="Nucleotide may be methylated to form 5-methylcytosine"
gttatacccttagtagttaacttcaacaaagtcctgttcatccttttatgaccgaggaaacggacacccatggagattaagtcaattaccggacatggcagagcctgaaaccaaactcagat

SEQ ID NO: 21618 - DNA, 122 bp, Homo sapiens
  misc_feature (61)..(62): /note="This region represents a CpG dinucleotide"
  misc_feature (61)..(61): /note="Nucleotide may be methylated to form 5-methylcytosine"
gggaaaagactttgttccatcctgttttgttgacatgctcttcatttttaagcctgaaaccgaagcttcctgctaagaattcaaaccatggagaaaaacgcagccatgataacggccactac

SEQ ID NO: 21619 - DNA, 122 bp, Homo sapiens
  misc_feature (61)..(62): /note="This region represents a CpG dinucleotide"
  misc_feature (61)..(61): /note="Nucleotide may be methylated to form 5-methylcytosine"
ccagaactgagattggagcatctacttagttccgccacttggtttgtagcctgggcaagtcgctttacctttcttagccatggcttatccatctatacaatagggataagccagttgccaat

SEQ ID NO: 21620 - DNA, 122 bp, Homo sapiens
  misc_feature (61)..(62): /note="This region represents a CpG dinucleotide"
  misc_feature (61)..(61): /note="Nucleotide may be methylated to form 5-methylcytosine"
catcctggctaggaacaaaagcaagatgatggcggtactaacttagacacacaacaccaacgtttccatagacagagcgggttcaaccccacacaggctgcacatttagaggtgagacactg

SEQ ID NO: 21621 - DNA, 122 bp, Homo sapiens
  misc_feature (61)..(62): /note="This region represents a CpG dinucleotide"
  misc_feature (61)..(61): /note="Nucleotide may be methylated to form 5-methylcytosine"
gacttgtcctcctggctctgcttcaatgacaacaggccaagccctcatggtagaaggtgccgttcccaccaacctgggccttctgcccccgcaggccctctctgggcaaggtcagctggtgc

SEQ ID NO: 21622 - DNA, 122 bp, Homo sapiens
  misc_feature (61)..(62): /note="This region represents a CpG dinucleotide"
  misc_feature (61)..(61): /note="Nucleotide may be methylated to form 5-methylcytosine"
gtcatagctggacacctgccagtcattgtttaagcactgaatttccaaggcacttaatgacgttgttacaacaggtgttttattcacagagttaattataatagcaaaaagaaaccaaaaca

SEQ ID NO: 21623 - DNA, 122 bp, Homo sapiens
  misc_feature (61)..(62): /note="This region represents a CpG dinucleotide"
  misc_feature (61)..(61): /note="Nucleotide may be methylated to form 5-methylcytosine"
ctggtgccttctggagcagtgtcatgagcaacctctggacctgcttgagccatggtttgtcgctgccaaggtttacagtttatacctttttgatgaacaggctgagttgcacctggggccat

SEQ ID NO: 21624 - DNA, 122 bp, Homo sapiens
  misc_feature (61)..(62): /note="This region represents a CpG dinucleotide"
  misc_feature (61)..(61): /note="Nucleotide may be methylated to form 5-methylcytosine"
agcaggaggagtgttgggctctttttaacagccatctctcaaaggaacaggcagatttttcgaggatgtgtaattctattatttatctgaccactcgtgccagataagcatgacagattcca

SEQ ID NO: 21625 - DNA, 122 bp, Homo sapiens
  misc_feature (61)..(62): /note="This region represents a CpG dinucleotide"
  misc_feature (61)..(61): /note="Nucleotide may be methylated to form 5-methylcytosine"
aacttctggggcccgaggcgtccgaatgctcgaggaacgatgatctgcaaagcaggattccgcagcaagttggtgcccgcggaagctgagcatcaatttgctcttagggaattttccatgtt

SEQ ID NO: 21626 - DNA, 122 bp, Homo sapiens
  misc_feature (61)..(62): /note="This region represents a CpG dinucleotide"
  misc_feature (61)..(61): /note="Nucleotide may be methylated to form 5-methylcytosine"
aggcatttgctctttgttttcatttcctctgagttccatgcacttctggaatcactcccacgtaatacaatgtgacctctcaccctaaatctgactccttatccagtggctactatgttgca

SEQ ID NO: 21627 - DNA, 122 bp, Homo sapiens
  misc_feature (61)..(62): /note="This region represents a CpG dinucleotide"
  misc_feature (61)..(61): /note="Nucleotide may be methylated to form 5-methylcytosine"
tttattatctcggagggctgggctggttcatggatgattcatgactctgctttccactgccgctggaggtgacatcatctattcgggacccagaatagacacaggagcaacagtgggccgtg

SEQ ID NO: 21628 - DNA, 122 bp, Homo sapiens
  misc_feature (61)..(62): /note="This region represents a CpG dinucleotide"
  misc_feature (61)..(61): /note="Nucleotide may be methylated to form 5-methylcytosine"
gactgcctgctgggtgggccacccatgccctgaatgaccccatcttctctcagatgcctacgacatggctaagctcctgtgtgacaagtattacatggcctcacctgacctggagatccagg

SEQ ID NO: 21629 - DNA, 122 bp, Homo sapiens
  misc_feature (61)..(62): /note="This region represents a CpG dinucleotide"
  misc_feature (61)..(61): /note="Nucleotide may be methylated to form 5-methylcytosine"
actgtaggcttatttcctcattactaaggccattccagattcctaagctttacctggtcccgcccatagcttcatttcctactatgcctccaccctatttcccagtcatccagaataacttg

SEQ ID NO: 21630 - DNA, 122 bp, Homo sapiens
  misc_feature (61)..(62): /note="This region represents a CpG dinucleotide"
  misc_feature (61)..(61): /note="Nucleotide may be methylated to form 5-methylcytosine"
aaaaactaagaatttcaagacagcacaagttaaatgccatgaaaccaggcattactactgcgttactctctggagtcacctctgccctggcctgcaaggtaactttccagaatcctactgtt

SEQ ID NO: 21631 - DNA, 122 bp, Homo sapiens
  misc_feature (61)..(62): /note="This region represents a CpG dinucleotide"
  misc_feature (61)..(61): /note="Nucleotide may be methylated to form 5-methylcytosine"
aatcctataagatcagggcccacccttgtgacctcatttaaacttaattgcttccataaacgccctatctccaaatacagttacactgggggttagggcttcagtgtatgaattggaagagg

SEQ ID NO: 21632 - DNA, 122 bp, Homo sapiens
  misc_feature (61)..(62): /note="This region represents a CpG dinucleotide"
  misc_feature (61)..(61): /note="Nucleotide may be methylated to form 5-methylcytosine"
gctcataaggataaggatactaagaagcgccgtattttatggggcatttcctacgtgctacgctctattctaagcattgggtgtggaggatctctcataaacctcagaatagctctttgagg

SEQ ID NO: 21633 - DNA, 122 bp, Homo sapiens
  misc_feature (61)..(62): /note="This region represents a CpG dinucleotide"
  misc_feature (61)..(61): /note="Nucleotide may be methylated to form 5-methylcytosine"
ctgcaggagaatctagtgcacgtgtgccctccctcactgaaaccaaggcccagcacatcacgcatgagcaggatgtgcagttcctgcagctggtttcagaatgaatcctttgtttccattca

SEQ ID NO: 21634 - DNA, 122 bp, Homo sapiens
  misc_feature (61)..(62): /note="This region represents a CpG dinucleotide"
  misc_feature (61)..(61): /note="Nucleotide may be methylated to form 5-methylcytosine"
agctcgccctgttcaagtgttccagaattgtgagctcgcgtacacatacaaaattccttccgcagtgctcacttccaattcacagcccatggcaagtcgggtaaggccctcctgagtcactg

SEQ ID NO: 21635 - DNA, 122 bp, Homo sapiens
  misc_feature (61)..(62): /note="This region represents a CpG dinucleotide"
  misc_feature (61)..(61): /note="Nucleotide may be methylated to form 5-methylcytosine"
ccccaaaggagagtgagggcagctgggggttcaatcacatagaacataaacctagccatgcgtaagcctcccggaacagaggctctcctgattcacacctcagagctccctgctggctgcag

SEQ ID NO: 21636 - DNA, 122 bp, Homo sapiens
  misc_feature (61)..(62): /note="This region represents a CpG dinucleotide"
  misc_feature (61)..(61): /note="Nucleotide may be methylated to form 5-methylcytosine"
aaagggcacatctgatgagttgcagaatcctagagcctgcgtctgtgccgtgacctcccacgcccagttccccggtgcctagcatgtagtaggagctcagtaaatatctgttgtgtaatata

SEQ ID NO: 21637 - DNA, 122 bp, Homo sapiens
  misc_feature (61)..(62): /note="This region represents a CpG dinucleotide"
  misc_feature (61)..(61): /note="Nucleotide may be methylated to form 5-methylcytosine"
gagaaatgcatcactaggcaatttcattgttgtgcgaacatcaccacacctggatggtggcgcctactacacacctaggctacagggtacagtctattcctccttggctacaaacctgtaca

SEQ ID NO: 21638 - DNA, 122 bp, Homo sapiens
  misc_feature (61)..(62): /note="This region represents a CpG dinucleotide"
  misc_feature (61)..(61): /note="Nucleotide may be methylated to form 5-methylcytosine"
gtttgcagtcaaggtggagaacagctgctgtagcagagcagttatgatagattgaaaggacgtgcttacctgcacttctgtgtgaccttatgttatctggctttcaaaggggtcgctttctt

SEQ ID NO: 21639 - DNA, 122 bp, Homo sapiens
  misc_feature (61)..(62): /note="This region represents a CpG dinucleotide"
  misc_feature (61)..(61): /note="Nucleotide may be methylated to form 5-methylcytosine"
ggggagaggtggtgccagtgtctcaggacagggtgacagttcagagaggtgacctgacaacgtgcctggccaccccaagcttctggatagagagagttttgtactcagttcttacagagtat

SEQ ID NO: 21640 - DNA, 122 bp, Homo sapiens
  misc_feature (61)..(62): /note="This region represents a CpG dinucleotide"
  misc_feature (61)..(61): /note="Nucleotide may be methylated to form 5-methylcytosine"
atgccagagatgactcaggcactgaataaatacttgttggattaactaagtgcattcttgcgtacgtgcttgaatgaatgaaggaatgagcgaatgaaaaaaaaaccaatgagtcagttcat

SEQ ID NO: 21641 - DNA, 122 bp, Homo sapiens
  misc_feature (61)..(62): /note="This region represents a CpG dinucleotide"
  misc_feature (61)..(61): /note="Nucleotide may be methylated to form 5-methylcytosine"
gctcatgtgtgatcctgcgtaaatcacattaccattttctcttctgtaatacgaagctaacgcatagtatttgcaagtctatgatgagccatgaaactgaaaatggactttgggtgagctaa

SEQ ID NO: 21642 - DNA, 122 bp, Homo sapiens
  misc_feature (61)..(62): /note="This region represents a CpG dinucleotide"
  misc_feature (61)..(61): /note="Nucleotide may be methylated to form 5-methylcytosine"
catgcccagccccaatctctgcatttctgagagctcatagcatctttcatccagggccctcgtaccaccttctttgctgttatcctcatgtgtggtattgtttctccaactgtgagcaactc

SEQ ID NO: 21643 - DNA, 122 bp, Homo sapiens
  misc_feature (61)..(62): /note="This region represents a CpG dinucleotide"
  misc_feature (61)..(61): /note="Nucleotide may be methylated to form 5-methylcytosine"
acatttcctagcttaccttgatgacaaatcagaatgtttacctattatgtttgcctagagcgaggaaacaatggaaactttttagagcgtgtgtgtgcatctgtgcccatgtgcctgtgtgt

SEQ ID NO: 21644 - DNA, 122 bp, Homo sapiens
  misc_feature (61)..(62): /note="This region represents a CpG dinucleotide"
  misc_feature (61)..(61): /note="Nucleotide may be methylated to form 5-methylcytosine"
tcctcaggcacatctccctaacacttcctgccaccttccgaggcaggaacagcacccggacggactacgagtaccagcactccaatttgtatgccatatcaggtatgtggagccaccgctgc

SEQ ID NO: 21645 - DNA, 122 bp, Homo sapiens
  misc_feature (61)..(62): /note="This region represents a CpG dinucleotide"
  misc_feature (61)..(61): /note="Nucleotide may be methylated to form 5-methylcytosine"
ctgagcagtcctgggtcccagctctgtgtttcattgctttagaaggaacatcgacctttccgagcaatgaacatcagctccagctcataggcatgagtcagggcaggcttcaccaggccagg

SEQ ID NO: 21646 - DNA, 122 bp, Homo sapiens
  misc_feature (61)..(62): /note="This region represents a CpG dinucleotide"
  misc_feature (61)..(61): /note="Nucleotide may be methylated to form 5-methylcytosine"
cctttcctcctcatttggtaatgattacctaaaatgaaggcaaaagtaaaggtaattctacgcagggtgaccaaagactcgagaaaaccacaaaagcatgcttggacagatctagctcagca

SEQ ID NO: 21647 - DNA, 122 bp, Homo sapiens
  misc_feature (61)..(62): /note="This region represents a CpG dinucleotide"
  misc_feature (61)..(61): /note="Nucleotide may be methylated to form 5-methylcytosine"
cccaaattagtcatgtaaatttactgaaggccaacagtagcagaaacttgtcaacaagaccgaggaagcaaaggaaggcagcatctttacatttttagtgtttataacacttcaaaagccta

SEQ ID NO: 21648 - DNA, 122 bp, Homo sapiens
  misc_feature (61)..(62): /note="This region represents a CpG dinucleotide"
  misc_feature (61)..(61): /note="Nucleotide may be methylated to form 5-methylcytosine"
tggcttctgtctctggtgccaaacccccaggcaagggaagtcccatgaggaaatttatcccgcctcaaatctgaaatcctcctcacaatcgtcaggagttgctgaggattctgggcttagtc

SEQ ID NO: 21649 - DNA, 122 bp, Homo sapiens
  misc_feature (61)..(62): /note="This region represents a CpG dinucleotide"
  misc_feature (61)..(61): /note="Nucleotide may be methylated to form 5-methylcytosine"
aaggtggttgccaaggaacaggagaggaagaagaggaagttggtgtttaatatgtgtggccgttctgcaagatgaaaaagttctgtcgtacaagagtgtgaatatacttgacactgctgaac

SEQ ID NO: 21650 - DNA, 122 bp, Homo sapiens
  misc_feature (61)..(62): /note="This region represents a CpG dinucleotide"
  misc_feature (61)..(61): /note="Nucleotide may be methylated to form 5-methylcytosine"
ctccttcccccagctcacttggagtcatgctgattttgtttagtcaatgctctgacagatcgcctttggtattttttcaattgtacctaggcttatctctcggtcacagatcaccttgagaa

SEQ ID NO: 21651 - DNA, 122 bp, Homo sapiens
  misc_feature (61)..(62): /note="This region represents a CpG dinucleotide"
  misc_feature (61)..(61): /note="Nucleotide may be methylated to form 5-methylcytosine"
caagctgctttgggctaaacccgatttaatacttatgaatgcagcatggttttgctcttacgtggctcagtttctgctgggtcattctgacacatgtgccacctggtaatgacctttgatct

SEQ ID NO: 21652 - DNA, 122 bp, Homo sapiens
  misc_feature (61)..(62): /note="This region represents a CpG dinucleotide"
  misc_feature (61)..(61): /note="Nucleotide may be methylated to form 5-methylcytosine"
catgggttcaaggagacaggaatttagctccacctcttgtgcaaagaacagtaaaaaatccgtagttcatctttaatctaccacaaagtggttttctaaagcattgttacaagaaggagagt

SEQ ID NO: 21653 - DNA, 122 bp, Homo sapiens
  misc_feature (61)..(62): /note="This region represents a CpG dinucleotide"
  misc_feature (61)..(61): /note="Nucleotide may be methylated to form 5-methylcytosine"
ttgacctccctggccactcagggccaaagccatacagtggaacagtgtgttctttaacctcgtaggacaactctcatatgcctgggcactatttttaggttactaccttggctgcccttctt

SEQ ID NO: 21654 - DNA, 122 bp, Homo sapiens
  misc_feature (61)..(62): /note="This region represents a CpG dinucleotide"
  misc_feature (61)..(61): /note="Nucleotide may be methylated to form 5-methylcytosine"
accatggaagagtcagcaaaggtgtggaaggctgtgctccagcctccagagtcccacacgcggcctcacacacccagcccaaggctgcacctggtactttgggacacttgcagcccttcctc

SEQ ID NO: 21655 - DNA, 122 bp, Homo sapiens
  misc_feature (61)..(62): /note="This region represents a CpG dinucleotide"
  misc_feature (61)..(61): /note="Nucleotide may be methylated to form 5-methylcytosine"
gacttgctgcaaccacatttatcagtcaggggattcctgtgtacctcttttctgatataacgccaaccccctttgtggtaagtagccatttcctttcataatttcctgtcacatgatcaggg

SEQ ID NO: 21656 - DNA, 122 bp, Homo sapiens
  misc_feature (61)..(62): /note="This region represents a CpG dinucleotide"
  misc_feature (61)..(61): /note="Nucleotide may be methylated to form 5-methylcytosine"
aagggacagtcctgaaactccttctatttgtgtagtgctttaaggtaaaagcacaaagcacgtgtatcaatagtctctctttaaatctttgcggtaataagatagctgacagtatcgttaag

SEQ ID NO: 21657 - DNA, 122 bp, Homo sapiens
  misc_feature (61)..(62): /note="This region represents a CpG dinucleotide"
  misc_feature (61)..(61): /note="Nucleotide may be methylated to form 5-methylcytosine"
ttcttctactctgttttgctttcactttactgtgttggcttgctcttaaattctttcctacgtgaagccaagaaccctcctggggtgagccccaattttggggtttgtctgcctcagatggg

SEQ ID NO: 21658 - DNA, 122 bp, Homo sapiens
  misc_feature (61)..(62): /note="This region represents a CpG dinucleotide"
  misc_feature (61)..(61): /note="Nucleotide may be methylated to form 5-methylcytosine"
ctgtgtagtaatcctgtttcacatcgggaatgctgtagtaggcagtgatttcattatccacgtgatcaagcttgaagagatcagaggatgaccaacagtgccttctgggtggtgcacactaa

SEQ ID NO: 21659 - DNA, 122 bp, Homo sapiens
  misc_feature (61)..(62): /note="This region represents a CpG dinucleotide"
  misc_feature (61)..(61): /note="Nucleotide may be methylated to form 5-methylcytosine"
cagtagttgataaagacaggcttacttaaagttcgaattgcctcaatcagagataacgggcgagtcccttttggcagtgagatatgaaaacaggagaatgatctgttatcagagtgaacatg

SEQ ID NO: 21660 - DNA, 122 bp, Homo sapiens
  misc_feature (61)..(62): /note="This region represents a CpG dinucleotide"
  misc_feature (61)..(61): /note="Nucleotide may be methylated to form 5-methylcytosine"
ttgctcaagttctcacagttacaaaacggtagatttggaattccatctcatgctgtctgacgccttaagcttaccactataaattcaatgtgtactcagtggttttaaaaaagatacaaagc

SEQ ID NO: 21661 - DNA, 122 bp, Homo sapiens
  misc_feature (61)..(62): /note="This region represents a CpG dinucleotide"
  misc_feature (61)..(61): /note="Nucleotide may be methylated to form 5-methylcytosine"
tgtctcaaaacaaagctaagatcgtgtcacctaggggacagttacagtgatgagacgtcacggacacctgtggtgcctgcttcagaggactcagcccaaagtttcaagagacaagagaccaa

SEQ ID NO: 21662 - DNA, 122 bp, Homo sapiens
  misc_feature (61)..(62): /note="This region represents a CpG dinucleotide"
  misc_feature (61)..(61): /note="Nucleotide may be methylated to form 5-methylcytosine"
cacaacccaattccctgtggcaaccaggtgttgctggtttaggttagtgattagtgcttacgggtggggtaaaagaaatacagccttggcttatgaatacctaggcacagaatgtccccacc

SEQ ID NO: 21663 - DNA, 122 bp, Homo sapiens
  misc_feature (61)..(62): /note="This region represents a CpG dinucleotide"
  misc_feature (61)..(61): /note="Nucleotide may be methylated to form 5-methylcytosine"
cagcccttcctcttccccaacctacacatgtcagagttgggtggaaccttagaactcacccgctcatcttctaagtgaggaaatcaagaccagagaggggaagtgattcacccaatctaaca

SEQ ID NO: 21664 - DNA, 122 bp, Homo sapiens
  misc_feature (61)..(62): /note="This region represents a CpG dinucleotide"
  misc_feature (61)..(61): /note="Nucleotide may be methylated to form 5-methylcytosine"
tatgtactttaaaatatttcaactcctctgaaattttacaatttctttcaatcagtatcacgcatgatgtgagagtataaaaatcgtccactgacaccttctggtaagatcaagaaaaacca

SEQ ID NO: 21665 - DNA, 122 bp, Homo sapiens
  misc_feature (61)..(62): /note="This region represents a CpG dinucleotide"
  misc_feature (61)..(61): /note="Nucleotide may be methylated to form 5-methylcytosine"
tcttaatttttttaagagacagctgtaacattgtttacaaacgtataaataccatcccagcgagaaactagctttgtgcttctgtcataaaagagacacaggtttctaacaggaaatggaaa

SEQ ID NO: 21666 - DNA, 122 bp, Homo sapiens
  misc_feature (61)..(62): /note="This region represents a CpG dinucleotide"
  misc_feature (61)..(61): /note="Nucleotide may be methylated to form 5-methylcytosine"
caccatccttccagttacaatcggatcacaccatctggggttctggcttggctctctgagcgtgctttcctgggttgtttaggctaggaattctcagccctactgccccacgttccttcctc

SEQ ID NO: 21667 - DNA, 122 bp, Homo sapiens
  misc_feature (61)..(62): /note="This region represents a CpG dinucleotide"
  misc_feature (61)..(61): /note="Nucleotide may be methylated to form 5-methylcytosine"
ttatcgacatcctcaatacagacaaattcaggaaacactcgacttctgatagccgggatccgtttttctgatattgttcatttcctctgtgtgggatgtgactttatggcagctaaaataac

SEQ ID NO: 21668 - DNA, 122 bp, Homo sapiens
  misc_feature (61)..(62): /note="This region represents a CpG dinucleotide"
  misc_feature (61)..(61): /note="Nucleotide may be methylated to form 5-methylcytosine"
ttataatagctgctttccggagctagtaaaccatatcctcctacactctgagcaatctcacggggtagaccgcaggttaacacctctcagactccttgaaaaatagctggtgacgggtcagt

SEQ ID NO: 21669 - DNA, 122 bp, Homo sapiens
  misc_feature (61)..(62): /note="This region represents a CpG dinucleotide"
  misc_feature (61)..(61): /note="Nucleotide may be methylated to form 5-methylcytosine"
tgcaaggagaaggaaccatgcatggtaagggtgacacagcaggatccttgggtgtgtccacgttctagaacctcaactgttgccacatctgtctgtccagacatcctggcagcagtaatgcc

SEQ ID NO: 21670 - DNA, 122 bp, Homo sapiens
  misc_feature (61)..(62): /note="This region represents a CpG dinucleotide"
  misc_feature (61)..(61): /note="Nucleotide may be methylated to form 5-methylcytosine"
taaaggattacataaattatgtaagactctggcctagtgcttggcacagacactgaggtccgtgagtgtgagcctaaggagtcccagggagaggagaagtaaatgtgtatgccccctctccc

SEQ ID NO: 21671 - DNA, 122 bp, Homo sapiens
  misc_feature (61)..(62): /note="This region represents a CpG dinucleotide"
  misc_feature (61)..(61): /note="Nucleotide may be methylated to form 5-methylcytosine"
tcgtttccctgagcccctccgaatttggggagctttgtgccaacttggtagtgctgaggccgctggggcagctggctcaggcactttccagcaccagggcatggtacattagcgggtggagg

SEQ ID NO: 21672 - DNA, 122 bp, Homo sapiens
  misc_feature (61)..(62): /note="This region represents a CpG dinucleotide"
  misc_feature (61)..(61): /note="Nucleotide may be methylated to form 5-methylcytosine"
tgtacttaccaaggagaaagaggagagacagcagtgctgggagattctcaaatagaaacccgtggacgctccaatgggcttgtcatgatatcaggctaggctttcctgctcatttttcaaag

SEQ ID NO: 21673 - DNA, 122 bp, Homo sapiens
  misc_feature (61)..(62): /note="This region represents a CpG dinucleotide"
  misc_feature (61)..(61): /note="Nucleotide may be methylated to form 5-methylcytosine"
tatttatctttgcagaaggcagtatcttaaccaccacatagtagcattaatctgtcacatcgtcccgaacatgcaagacactatttgttattgaagaggagacttctttatggaaggatatt

SEQ ID NO: 21674 - DNA, 122 bp, Homo sapiens
  misc_feature (61)..(62): /note="This region represents a CpG dinucleotide"
  misc_feature (61)..(61): /note="Nucleotide may be methylated to form 5-methylcytosine"
agacctcgtcaacttttagtcgctaacaggcatcactcaagccagtcaatacttaatgaccgttagttacccttgctgtcttcctagaaaccatatacatatgtgtgtatatatgtatgtgt

SEQ ID NO: 21675 - DNA, 122 bp, Homo sapiens
  misc_feature (61)..(62): /note="This region represents a CpG dinucleotide"
  misc_feature (61)..(61): /note="Nucleotide may be methylated to form 5-methylcytosine"
tggctaagaaccaattctgactggttaatataaaaggctgggatgaaaggaatgaggattcgttgcattccattcttgctacgttcactgaccagtgtagcccacccatagactgaggtgtc

SEQ ID NO: 21676 - DNA, 122 bp, Homo sapiens
  misc_feature (61)..(62): /note="This region represents a CpG dinucleotide"
  misc_feature (61)..(61): /note="Nucleotide may be methylated to form 5-methylcytosine"
ctccaggtggctcagccggcacctgatggtcagcagcacacatcagacacgcagctcaaccgtccagttcctccggatcttactgctggcacccatattgaggtggaaggaagcctttgggt

SEQ ID NO: 21677 - DNA, 122 bp, Homo sapiens
  misc_feature (61)..(62): /note="This region represents a CpG dinucleotide"
  misc_feature (61)..(61): /note="Nucleotide may be methylated to form 5-methylcytosine"
aagggtgtgtctcatggtgagcgactggggagccgcccagccggtctgtcttctgagcaccgtgagtgggaagcccctgagttccttgtgcgtcagtcctcacacatcccttgtggtgccca

SEQ ID NO: 21678 - DNA, 122 bp, Homo sapiens
  misc_feature (61)..(62): /note="This region represents a CpG dinucleotide"
  misc_feature (61)..(61): /note="Nucleotide may be methylated to form 5-methylcytosine"
cagctccagcttcagctccagctccaggtcgggctccagctccagccgcagcttaggcagcggaggttctgtgtcccaggtgaggaggccccagaatctgaatgagctgcattcattccctt

SEQ ID NO: 21679 - DNA, 122 bp, Homo sapiens
  misc_feature (61)..(62): /note="This region represents a CpG dinucleotide"
  misc_feature (61)..(61): /note="Nucleotide may be methylated to form 5-methylcytosine"
ttatatagcctaaccacagaagtggcatcccatcccattctattggttagaagcaagtcacgaggccagttcactctcagagggaagggattacacaagggggtgaattctgggagacagag

SEQ ID NO: 21680 - DNA, 122 bp, Homo sapiens
  misc_feature (61)..(62): /note="This region represents a CpG dinucleotide"
  misc_feature (61)..(61): /note="Nucleotide may be methylated to form 5-methylcytosine"
tggggtagaatttcgatgtttggaagggatgtggagggatgttatgaagaggaagcctcacgccataccaccttgggtcttggtgttaagtcattatcaaccattacatttgctttaaagca

SEQ ID NO: 21681 - DNA, 122 bp, Homo sapiens
  misc_feature (61)..(62): /note="This region represents a CpG dinucleotide"
  misc_feature (61)..(61): /note="Nucleotide may be methylated to form 5-methylcytosine"
gtttcccagtttccctttctggaaaccaccactgctagcagtttcttgcgtattcttccacgtaggctaagcagaaattgtgtgtttgtgtccttccctttttaaaacacaaatgatagcat

SEQ ID NO: 21682 - DNA, 122 bp, Homo sapiens
  misc_feature (61)..(62): /note="This region represents a CpG dinucleotide"
  misc_feature (61)..(61): /note="Nucleotide may be methylated to form 5-methylcytosine"
ccggccaagattattttaaaaggcatgacacactgtctctcgtgctccaccatggtaagacgtgcttgcttccccttcaccttccgctatgattgtaagtttcctgaggcctcctagtcatg

SEQ ID NO: 21683 - DNA, 122 bp, Homo sapiens
  misc_feature (61)..(62): /note="This region represents a CpG dinucleotide"
  misc_feature (61)..(61): /note="Nucleotide may be methylated to form 5-methylcytosine"
ccttttcatctttgtggttctttctgtgggcccctgtgcccgtgatctgccatgagtcagcgtctaaggatcccccaggcctcctgtctgtaaattattaacacctctcctgtcctctgttt

SEQ ID NO: 21684 - DNA, 122 bp, Homo sapiens
  misc_feature (61)..(62): /note="This region represents a CpG dinucleotide"
  misc_feature (61)..(61): /note="Nucleotide may be methylated to form 5-methylcytosine"
cacggctgactaaagctgtcttttattctgctaacacccttcaaatactgttgacaatatcgcctctcaagtgtttcctcccacaaaatctgctgcttatagcacaggcaccaaagtcctgc

SEQ ID NO: 21685 - DNA, 122 bp, Homo sapiens
  misc_feature (61)..(62): /note="This region represents a CpG dinucleotide"
  misc_feature (61)..(61): /note="Nucleotide may be methylated to form 5-methylcytosine"
cacagtggattaactttcacctatgttaataatcaaattctagttctgacaaaggccccacgccaacagtgattacaatgaccaaaaatatttacttgttggttctcattcagttctataga

SEQ ID NO: 21686 - DNA, 122 bp, Homo sapiens
  misc_feature (61)..(62): /note="This region represents a CpG dinucleotide"
  misc_feature (61)..(61): /note="Nucleotide may be methylated to form 5-methylcytosine"
aatgatcacaacagccagggaacccagtccaacacccgccatctgcagcagcatgagtgacgaatctgtgggacaaaaccacaggcttagcccagagtgcacggcatcaccacctcccagga

SEQ ID NO: 21687 - DNA, 122 bp, Homo sapiens
  misc_feature (61)..(62): /note="This region represents a CpG dinucleotide"
  misc_feature (61)..(61): /note="Nucleotide may be methylated to form 5-methylcytosine"
tgtgagccacacaaggtcagaaagcagatatgattcctgtatcagagttcctgcctgttacgcattgaacgctgtcttagtccatttgggctgctataacagggtggcttataaacaacaga

SEQ ID NO: 21688 - DNA, 122 bp, Homo sapiens
  misc_feature (61)..(62): /note="This region represents a CpG dinucleotide"
  misc_feature (61)..(61): /note="Nucleotide may be methylated to form 5-methylcytosine"
ggaggttttcccacggtaattggctctgaagtatcctaacttaatggttgtgtttttcaacgggagactgaattccaaagggaattccacagggaatttaaatgtacaaacattttttgagt

SEQ ID NO: 21689 - DNA, 122 bp, Homo sapiens
  misc_feature (61)..(62): /note="This region represents a CpG dinucleotide"
  misc_feature (61)..(61): /note="Nucleotide may be methylated to form 5-methylcytosine"
gtggcaggaagcttggcgtgctagagggttgtggttgggctgctggggcccggttggctgcggagccctccggaggaggcaggaagtcagggtgggacgtgggcgcggggagacaggtggtg

SEQ ID NO: 21690 - DNA, 122 bp, Homo sapiens
  misc_feature (61)..(62): /note="This region represents a CpG dinucleotide"
  misc_feature (61)..(61): /note="Nucleotide may be methylated to form 5-methylcytosine"
ctgtgtcctcagtggtggtgtctagggatggggtacacagcccagcctctgcccagggctcggaagcccttggccaaatcccggctactccctgctccggcaggctgagcgatgcccgtgca

SEQ ID NO: 21691 - DNA, 122 bp, Homo sapiens
  misc_feature (61)..(62): /note="This region represents a CpG dinucleotide"
  misc_feature (61)..(61): /note="Nucleotide may be methylated to form 5-methylcytosine"
acgaaaccccagagagagcagccagctaagtgacaaagctggtttctgaacacacgggcccgtgtatttgttcattgcattacgtggtggcccagggggatggatttccaacctgggtgtgc

SEQ ID NO: 21692 - DNA, 122 bp, Homo sapiens
  misc_feature (61)..(62): /note="This region represents a CpG dinucleotide"
  misc_feature (61)..(61): /note="Nucleotide may be methylated to form 5-methylcytosine"
gtgagtagattagagggggtcgtgatgaagttgctgctttaactcatggatactgaaagacggagctgttggaaagtaaaaatatgttgttaatcataggggttatttttggcccagttagt

SEQ ID NO: 21693 - DNA, 122 bp, Homo sapiens
  misc_feature (61)..(62): /note="This region represents a CpG dinucleotide"
  misc_feature (61)..(61): /note="Nucleotide may be methylated to form 5-methylcytosine"
tgcaacaggattagtctattattccctttcttgtgtttactgagaaagcctccacttcaacgttccatgaagtgtgttccattaaataccaaagtataggcaaaaagttctgtggtcaaata

SEQ ID NO: 21694 - DNA, 122 bp, Homo sapiens
  misc_feature (61)..(62): /note="This region represents a CpG dinucleotide"
  misc_feature (61)..(61): /note="Nucleotide may be methylated to form 5-methylcytosine"
catcttcacaaagaatagaattcaacgcaaacattttcacagtaagtcaataaagtggtacgtcaggatttgggaaatgccactgtttgcaagcacaaatctaaagtctgttttatgacaga

SEQ ID NO: 21695 - DNA, 122 bp, Homo sapiens
  misc_feature (61)..(62): /note="This region represents a CpG dinucleotide"
  misc_feature (61)..(61): /note="Nucleotide may be methylated to form 5-methylcytosine"
gagggggagagcctaaacagatgtgtttttgtatcatgcagtcgacttctgcatctgaaacgtaactcagcgaaacagaaacccagccatgtgactccttttctgtagagaatagagttgaa

SEQ ID NO: 21696 - DNA, 122 bp, Homo sapiens
  misc_feature (61)..(62): /note="This region represents a CpG dinucleotide"
  misc_feature (61)..(61): /note="Nucleotide may be methylated to form 5-methylcytosine"
gagtgagtttgagtaagtcacctcacttctctcaacctcagtttcctcagtggtagaatgcgagttctgataccttacaggttgcagtgaggattcccgtcaatataagggtctcagcacat

SEQ ID NO: 21697 - DNA, 122 bp, Homo sapiens
  misc_feature (61)..(62): /note="This region represents a CpG dinucleotide"
  misc_feature (61)..(61): /note="Nucleotide may be methylated to form 5-methylcytosine"
caatcctgcctgtccatctcaatgacatctactatccctgatcaacacggcaccttaaggcgcccttcacagtgaaagcaacttatttccaaagcaggcattttgccttccattgctcctcc

SEQ ID NO: 21698 - DNA, 122 bp, Homo sapiens
  misc_feature (61)..(62): /note="This region represents a CpG dinucleotide"
  misc_feature (61)..(61): /note="Nucleotide may be methylated to form 5-methylcytosine"
tcaaatgcctcttgaactggcctggggccttggctgtggcagcctgtttgcactgcagagcgtggtctcagactttggattgctctaagaattgtcattctcttcaggggctgaaatcctca

SEQ ID NO: 21699 - DNA, 122 bp, Homo sapiens
  misc_feature (61)..(62): /note="This region represents a CpG dinucleotide"
  misc_feature (61)..(61): /note="Nucleotide may be methylated to form 5-methylcytosine"
gttcataatcctgcaatgattcacactcagaataaaacccagagctcataccatggcttgcgtgttcaagcccctggttattgccacgttttcatcgctgcagtctctccttgcaggtttgc

SEQ ID NO: 21700 - DNA, 122 bp, Homo sapiens
  misc_feature (61)..(62): /note="This region represents a CpG dinucleotide"
  misc_feature (61)..(61): /note="Nucleotide may be methylated to form 5-methylcytosine"
tgtcactctctactgggtctctatgtattttcattcattgtcatggttacatctattatccgtacatgcagggttctaaaacttaagagggattccagaggttcctaaaacaataaacaaaa

SEQ ID NO: 21701 - DNA, 122 bp, Homo sapiens
  misc_feature (61)..(62): /note="This region represents a CpG dinucleotide"
  misc_feature (61)..(61): /note="Nucleotide may be methylated to form 5-methylcytosine"
cacaggctgccctggagcaattttccttctccattttctacgcctgggagcaggtgtgtccgctgtgacgtcctttaaccaggatgctggcagcttcagcttagacgcttcacccaaagcca

SEQ ID NO: 21702 - DNA, 122 bp, Homo sapiens
  misc_feature (61)..(62): /note="This region represents a CpG dinucleotide"
  misc_feature (61)..(61): /note="Nucleotide may be methylated to form 5-methylcytosine"
cttaaatcatgcagcttgtcaggtcaggtcaagcatagcctggatctcaccacattcttacgggattgaaggatgtaatattaatgactcagtaggcttggaatcagccaatcagcaagtgc

SEQ ID NO: 21703 - DNA, 122 bp, Homo sapiens
  misc_feature (61)..(62): /note="This region represents a CpG dinucleotide"
  misc_feature (61)..(61): /note="Nucleotide may be methylated to form 5-methylcytosine"
ctttcttcttgcagtccactctcaagaaacacagaaaagttgcatgctccttaagtcacacgtcccttaagctggactggggttgagtttgtataaactgttgccgtttttctttttccctc

SEQ ID NO: 21704 - DNA, 122 bp, Homo sapiens
  misc_feature (61)..(62): /note="This region represents a CpG dinucleotide"
  misc_feature (61)..(61): /note="Nucleotide may be methylated to form 5-methylcytosine"
gctgtgaggggtggagccagccacctgccccacctcacccgtaccctcgctacctcatgccggaggctgcacaggtatctgggacatccagccccatgtattacacccttacctctgacctg

SEQ ID NO: 21705 - DNA, 122 bp, Homo sapiens
  misc_feature (61)..(62): /note="This region represents a CpG dinucleotide"
  misc_feature (61)..(61): /note="Nucleotide may be methylated to form 5-methylcytosine"
agaccttgccctttgctctatgtccaaaggtgagtctaaatgtccagccacacctgtatgcggtgatgcctgtgggtttgggtgtgggagcctgcaggtacaatgcctgtgaaaggtataat

SEQ ID NO: 21706 - DNA, 122 bp, Homo sapiens
  misc_feature (61)..(62): /note="This region represents a CpG dinucleotide"
  misc_feature (61)..(61): /note="Nucleotide may be methylated to form 5-methylcytosine"
aaattctcatagtaggaaagagttacaggagttatatagtaaacctacaccaagaaatttcgtaggaattatatgccaatgaaagaaaatgtaggtaggcaggtcttagtaatgtatatctg

SEQ ID NO: 21707 - DNA, 122 bp, Homo sapiens
  misc_feature (61)..(62): /note="This region represents a CpG dinucleotide"
  misc_feature (61)..(61): /note="Nucleotide may be methylated to form 5-methylcytosine"
ggaaggataaattaattaccagtggcttccccttccgctcaaggcattgccccatgtccacggtccaggtctgcctcaggcacagccagctccaatgccattgagagaagagatctcagact

SEQ ID NO: 21708 - DNA, 122 bp, Homo sapiens
  misc_feature (61)..(62): /note="This region represents a CpG dinucleotide"
  misc_feature (61)..(61): /note="Nucleotide may be methylated to form 5-methylcytosine"
tctgatagtacacaatattcagaaattaaagagacggttcccttctactttcttttcaatcgctgcctcaagaacaggggacctttgttacactccatggtatactgagcatatgtatggga

SEQ ID NO: 21709 - DNA, 122 bp, Homo sapiens
  misc_feature (61)..(62): /note="This region represents a CpG dinucleotide"
  misc_feature (61)..(61): /note="Nucleotide may be methylated to form 5-methylcytosine"
atacttgttttcgtttgaggcactttgcatttattatctcctttaatcctcagggccatgcggtatcatgtctctcgaagagataagaacacagagatgcttgtctgtgggtctcttacttc

SEQ ID NO: 21710 - DNA, 122 bp, Homo sapiens
  misc_feature (61)..(62): /note="This region represents a CpG dinucleotide"
  misc_feature (61)..(61): /note="Nucleotide may be methylated to form 5-methylcytosine"
gcagttaagaaacaaaataaaccatcaataagtgagctacagcaacggcaataaaagccacgtgtaagtcctaacttctcccacagtagtaaattttaataccatcaaattttgcagtgtgc

SEQ ID NO: 21711 - DNA, 122 bp, Homo sapiens
  misc_feature (61)..(62): /note="This region represents a CpG dinucleotide"
  misc_feature (61)..(61): /note="Nucleotide may be methylated to form 5-methylcytosine"
ctttaaataggcattgagtttgaagatagagcacatgatgaaggaaagtcagaccccagtcggctatttagctttcagttctgaggaacctgtcattgcttgcttctgtaaacccagctaat

SEQ ID NO: 21712 - DNA, 122 bp, Homo sapiens
  misc_feature (61)..(62): /note="This region represents a CpG dinucleotide"
  misc_feature (61)..(61): /note="Nucleotide may be methylated to form 5-methylcytosine"
gtagattgacaataaagaactagtctagcacatttggatcttaaacataaaacaaggcaacgtagattgttttaaaaatgaagtttgtgctagtctgagacctcaggtattaaatgtcttca

SEQ ID NO: 21713 - DNA, 122 bp, Homo sapiens
  misc_feature (61)..(62): /note="This region represents a CpG dinucleotide"
  misc_feature (61)..(61): /note="Nucleotide may be methylated to form 5-methylcytosine"
acaaaagcaaatacctcatactccttccactctatagaaaaaccaacaggtacagtatcacgtagctaggtaggccttgaatagaaaaaagggtaactcagctttgacaaggacatttatct

SEQ ID NO: 21714 - DNA, 122 bp, Homo sapiens
  misc_feature (61)..(62): /note="This region represents a CpG dinucleotide"
  misc_feature (61)..(61): /note="Nucleotide may be methylated to form 5-methylcytosine"
atgctgaaaatatatggactgcttaaagcctattatgaatcagccaacactggggagagacgcactggctgcatcctcaccggacgggtcatcctggctgctaagacctagacccacccggg

SEQ ID NO: 21715 - DNA, 122 bp, Homo sapiens
  misc_feature (61)..(62): /note="This region represents a CpG dinucleotide"
  misc_feature (61)..(61): /note="Nucleotide may be methylated to form 5-methylcytosine"
ttgctgtgttatgtggtttttgagtaatcttaacatatagctgactgcattactgagtaacgtgggacattttcatatctttattatgttaattcatctgtccttcaaaagcatctgagttt

SEQ ID NO: 21716 - DNA, 122 bp, Homo sapiens
  misc_feature (61)..(62): /note="This region represents a CpG dinucleotide"
  misc_feature (61)..(61): /note="Nucleotide may be methylated to form 5-methylcytosine"
tatggcctattgctcctaggctgcaaacctgtccagcatgcgactgtactgagtgctgtgcgagtgtacctaaacatagaatggtacagtaagagtacagtacgaaagataaaaaggggtgc

SEQ ID NO: 21717 - DNA, 122 bp, Homo sapiens
  misc_feature (61)..(62): /note="This region represents a CpG dinucleotide"
  misc_feature (61)..(61): /note="Nucleotide may be methylated to form 5-methylcytosine"
ccagcttggacaacatagggagactccatctcaaataatttactgatatttgtaaataaacgaacagggtggtttcagactgtgataaatactaagcaaatcagggtaatgtgactcagggt

SEQ ID NO: 21718 - DNA, 122 bp, Homo sapiens
  misc_feature (61)..(62): /note="This region represents a CpG dinucleotide"
  misc_feature (61)..(61): /note="Nucleotide may be methylated to form 5-methylcytosine"
cctggaatcagtgcattcatatcatccctcttaagtggctctggtggttatattattgtgcggtgctatgagtcactgtctattaatataacttacccagggcttgtaacaggacagctggc

SEQ ID NO: 21719 - DNA, 122 bp, Homo sapiens
  misc_feature (61)..(62): /note="This region represents a CpG dinucleotide"
  misc_feature (61)..(61): /note="Nucleotide may be methylated to form 5-methylcytosine"
ccatggctaccactttgaatttattgataacttttttattattctcacatttcatgacagcgttatcaatttctgagagatgatataaagacacttcagactttatttcctgcttccttaaa

SEQ ID NO: 21720 - DNA, 122 bp, Homo sapiens
  misc_feature (61)..(62): /note="This region represents a CpG dinucleotide"
  misc_feature (61)..(61): /note="Nucleotide may be methylated to form 5-methylcytosine"
ctccttggtagatccatgtttccaccaatttcaagacatgttttcttatgtgtttaatcccgtcttgagacgggtctattgttctccgttctccaggaaatgctccatagtcaaaacatcac

SEQ ID NO: 21721 - DNA, 122 bp, Homo sapiens
  misc_feature (61)..(62): /note="This region represents a CpG dinucleotide"
  misc_feature (61)..(61): /note="Nucleotide may be methylated to form 5-methylcytosine"
aggaggcactcaccggagcctcggacatgagcactgggtgcaggtttggctcagacttgacgtgtttgctgtaggtgtgatccaggatggctcggaagcactcccagtcctcgactggggcc

SEQ ID NO: 21722 - DNA, 122 bp, Homo sapiens
  misc_feature (61)..(62): /note="This region represents a CpG dinucleotide"
  misc_feature (61)..(61): /note="Nucleotide may be methylated to form 5-methylcytosine"
tttttatatcatttgacttttcttctttcctcctgtaattacttcatttcagtgaaatcacgctgtattatgatttaacaactggaacagtcacttaagcattgatattttgcaagctcctt

SEQ ID NO: 21723 - DNA, 122 bp, Homo sapiens
  misc_feature (61)..(62): /note="This region represents a CpG dinucleotide"
  misc_feature (61)..(61): /note="Nucleotide may be methylated to form 5-methylcytosine"
gatttgacttctgcttgtaggcatttccacagttctcacatttatagggcctttcctctgcgtgagttttctgatgtttatcaagcttccacttctccccgaatgctcttccacagctatga

SEQ ID NO: 21724 - DNA, 122 bp, Homo sapiens
  misc_feature (61)..(62): /note="This region represents a CpG dinucleotide"
  misc_feature (61)..(61): /note="Nucleotide may be methylated to form 5-methylcytosine"
gtgtctctttgttctctcacccattgattcactcatatatttataactctgattcactctcgctttcactccaaaacacatttatttattcagtcgtttgctcactttgccaatcatttgct

SEQ ID NO: 21725 - DNA, 122 bp, Homo sapiens
  misc_feature (61)..(62): /note="This region represents a CpG dinucleotide"
  misc_feature (61)..(61): /note="Nucleotide may be methylated to form 5-methylcytosine"
tcctgctttgcctgactcctgccatttaatggtaattaaaataaaatgatgggccggcaccgtggctcacgcctattaatcttggcactatgtgaggcctgaggcaggcttaagcctaggag

SEQ ID NO: 21726 - DNA, 122 bp, Homo sapiens
  misc_feature (61)..(62): /note="This region represents a CpG dinucleotide"
  misc_feature (61)..(61): /note="Nucleotide may be methylated to form 5-methylcytosine"
tagtcatggcatgagtcagctgtgagggctgatggcacaccaccgaatactctgctgtggcgccactagcctccatttaccttcttctccaacgttttccagcctccctcataccttgcccc

SEQ ID NO: 21727 - DNA, 122 bp, Homo sapiens
  misc_feature (61)..(62): /note="This region represents a CpG dinucleotide"
  misc_feature (61)..(61): /note="Nucleotide may be methylated to form 5-methylcytosine"
tgtggcagacttggtgtttcgaaagcccaacttgcttcttagacaagagaatttcctttccgctttcagtgtgtgctgagtgaaaatgaaagaactgtgtctggggaggcatgtcctcattt

SEQ ID NO: 21728 - DNA, 122 bp, Homo sapiens
  misc_feature (61)..(62): /note="This region represents a CpG dinucleotide"
  misc_feature (61)..(61): /note="Nucleotide may be methylated to form 5-methylcytosine"
aacgtgttttcttctcttgatatttcacatacctcgggtaagcatggcatctaaagctctcgtcatcgtgtgctcttctcctgatggtgttgacgacccagtgttaacagggaatggttatt

SEQ ID NO: 21729 - DNA, 122 bp, Homo sapiens
  misc_feature (61)..(62): /note="This region represents a CpG dinucleotide"
  misc_feature (61)..(61): /note="Nucleotide may be methylated to form 5-methylcytosine"
gtaagcttgtgcttggcttggagccactattgtctgtaaaaggtacaactacgctgctgacgctgtacatacatcttgcgctcatggctcatggccagagagagagtaaatccatgttgaaa

SEQ ID NO: 21730 - DNA, 122 bp, Homo sapiens
  misc_feature (61)..(62): /note="This region represents a CpG dinucleotide"
  misc_feature (61)..(61): /note="Nucleotide may be methylated to form 5-methylcytosine"
actgacatcaacccatagaaccccacacacaagtttacaggattcctggttggggagttccgttttgactgtcaagtttactctgcaactgagccaggtctcctgtaccaataagcaacggg

SEQ ID NO: 21731 - DNA, 122 bp, Homo sapiens
  misc_feature (61)..(62): /note="This region represents a CpG dinucleotide"
  misc_feature (61)..(61): /note="Nucleotide may be methylated to form 5-methylcytosine"
ggctccaagtgtttttgcctgtgaaccctccccagtctcacaattgcatgaggttggggccgtaactatcctcattaaataaccttgggaggtggtatcatgcccagggtcacagaacccca

SEQ ID NO: 21732 - DNA, 122 bp, Homo sapiens
  misc_feature (61)..(62): /note="This region represents a CpG dinucleotide"
  misc_feature (61)..(61): /note="Nucleotide may be methylated to form 5-methylcytosine"
agctttatgtggtggattccataaatgacttaaacaaactaaacctctgtccagccggatcgcagcatctgttccgtatgtgtgctggggaaggcacagcagcccttcctagcttctaggct

SEQ ID NO: 21733 - DNA, 122 bp, Homo sapiens
  misc_feature (61)..(62): /note="This region represents a CpG dinucleotide"
  misc_feature (61)..(61): /note="Nucleotide may be methylated to form 5-methylcytosine"
cccagtccaggaacttcaagttaaaatcaagggtccccactagggcagacgccaagaggacggtatcagcacaacagctcggcccccaggaacagaagtctctctgccaccttctacctcga

SEQ ID NO: 21734 - DNA, 122 bp, Homo sapiens
  misc_feature (61)..(62): /note="This region represents a CpG dinucleotide"
  misc_feature (61)..(61): /note="Nucleotide may be methylated to form 5-methylcytosine"
ctctgcagtgagagaggggtggagcctgagagaaagtgaaccgtgaagaaaccaacaatccgaagccacagggctgaagaacaaataatttcttagattaagttcctcatttatgagctacc

SEQ ID NO: 21735 - DNA, 122 bp, Homo sapiens
  misc_feature (61)..(62): /note="This region represents a CpG dinucleotide"
  misc_feature (61)..(61): /note="Nucleotide may be methylated to form 5-methylcytosine"
ggcgtgtgcctgcaggtgtgtcctcacgggtgtgtcctcatgggcatgtgcctgcaggtgcgtcctcatgggcgtgtgcctgcaggtgcgtcctcatgggagtgtcctcatgggtgtgtggc

SEQ ID NO: 21736 - DNA, 122 bp, Homo sapiens
  misc_feature (61)..(62): /note="This region represents a CpG dinucleotide"
  misc_feature (61)..(61): /note="Nucleotide may be methylated to form 5-methylcytosine"
atgagccgcagggaggcatctgtgatgtccaggcctgccaggcgcagctccacgatgttccggagcttgctccgattgtccatctgacctggtggggcaggaaggagggggcaacccgtcaa

SEQ ID NO: 21737 - DNA, 122 bp, Homo sapiens
  misc_feature (61)..(62): /note="This region represents a CpG dinucleotide"
  misc_feature (61)..(61): /note="Nucleotide may be methylated to form 5-methylcytosine"
ggattattttagagatttatgacaattccatttgttcctatataggggatctgagcttgacgcttgatgctggatttgactaactccctgcaaagccagcagggtgtagatgtgtattacca

SEQ ID NO: 21738 - DNA, 122 bp, Homo sapiens
  misc_feature (61)..(62): /note="This region represents a CpG dinucleotide"
  misc_feature (61)..(61): /note="Nucleotide may be methylated to form 5-methylcytosine"
gtggcattaaaagccctgcagaccatatgatcatggaatgacccttacccaagcagaaatcgcaatctctctcgagttgtgaatgttgtcattgacctatgtgaaactgacatctttattct

SEQ ID NO: 21739 - DNA, 122 bp, Homo sapiens
  misc_feature (61)..(62): /note="This region represents a CpG dinucleotide"
  misc_feature (61)..(61): /note="Nucleotide may be methylated to form 5-methylcytosine"
tgattggaacataggattcatttaaggaaagtttggtttaaaaagttgaacaattgattgcggagaaacttgaatgacaggctaagtgatagggagcataaaggagtttaggtgattttttg

SEQ ID NO: 21740 - DNA, 122 bp, Homo sapiens
  misc_feature (61)..(62): /note="This region represents a CpG dinucleotide"
  misc_feature (61)..(61): /note="Nucleotide may be methylated to form 5-methylcytosine"
acatttgggaaagggacccatgtattcattatatctggtgagtcatcccaggtggcaccacgtgcaaccccatgggccagtgtcactaatcctttctctggagatatcacttattactatgg

SEQ ID NO: 21741 - DNA, 122 bp, Homo sapiens
  misc_feature (61)..(62): /note="This region represents a CpG dinucleotide"
  misc_feature (61)..(61): /note="Nucleotide may be methylated to form 5-methylcytosine"
aggctatgactacttgttcgtggcatgcactctagttctgctgtgacctttgtacctgtgcgagtttgggaagtaggaacttctgtatttgacgaccatttcccttgttcctggcacagtgc

SEQ ID NO: 21742 - DNA, 122 bp, Homo sapiens
  misc_feature (61)..(62): /note="This region represents a CpG dinucleotide"
  misc_feature (61)..(61): /note="Nucleotide may be methylated to form 5-methylcytosine"
aaattacactgaccacaagccttttctgcctaacccacagcatgtagaatctccatgagacgtttaagtacccgacaaactcctcagtgggaaaccatttgagggcagactggccagaaagc

SEQ ID NO: 21743 - DNA, 122 bp, Homo sapiens
  misc_feature (61)..(62): /note="This region represents a CpG dinucleotide"
  misc_feature (61)..(61): /note="Nucleotide may be methylated to form 5-methylcytosine"
gtatggctgctttgcttcatagctcagagactgaaccagagctagaggttatgaactagacgaggatttcatacatttttttctccagccacttttctccgttagtaaataaacaaatgaat

SEQ ID NO: 21744 - DNA, 122 bp, Homo sapiens
  misc_feature (61)..(62): /note="This region represents a CpG dinucleotide"
  misc_feature (61)..(61): /note="Nucleotide may be methylated to form 5-methylcytosine"
tttccggaaaactgagcccacattgtctgcacaggaagccagtctacattgtgtgtgtctcgtgtatgtgtgtgtgtgtatgtgtgtatgtgtgtgtgtgtgtttaacccaaaaaacagatg

SEQ ID NO: 21745 - DNA, 122 bp, Homo sapiens
  misc_feature (61)..(62): /note="This region represents a CpG dinucleotide"
  misc_feature (61)..(61): /note="Nucleotide may be methylated to form 5-methylcytosine"
actgggggttatgagacagtggcaggagggggacactcccagagtgctgccagaaagaggcgaggccccatctggatttgatggcatttttattgtggtgttgttttagagacagtgtctgt

SEQ ID NO: 21746 - DNA, 122 bp, Homo sapiens
  misc_feature (61)..(62): /note="This region represents a CpG dinucleotide"
  misc_feature (61)..(61): /note="Nucleotide may be methylated to form 5-methylcytosine"
ctctgcacacagtacgtgttcaattaggtgttcctttcctgggttcaggtcatcagcctccgtacagctcaggaggacagcagcaggcagggaagggcccgggcctggaaactcctcctagc

SEQ ID NO: 21747 - DNA, 122 bp, Homo sapiens
  misc_feature (61)..(62): /note="This region represents a CpG dinucleotide"
  misc_feature (61)..(61): /note="Nucleotide may be methylated to form 5-methylcytosine"
cggcagcagtctgcagggctaagagcaccgcgggaggagccttgcaggtgggtcgcgtgacgcacatgtcacgtgatgcgcctgaggccgttcgcgccatctttgttgagggcgagtgccag

SEQ ID NO: 21748 - DNA, 122 bp, Homo sapiens
  misc_feature (61)..(62): /note="This region represents a CpG dinucleotide"
  misc_feature (61)..(61): /note="Nucleotide may be methylated to form 5-methylcytosine"
cttcagcccagaagtgctacctgtcacttccctgcagagccccttggccagacgtagtcacgtggccacatctaactgcaagatagctgggaagagtagttttcagtgtgcccaggatggag

SEQ ID NO: 21749 - DNA, 122 bp, Homo sapiens
  misc_feature (61)..(62): /note="This region represents a CpG dinucleotide"
  misc_feature (61)..(61): /note="Nucleotide may be methylated to form 5-methylcytosine"
tcatctctgacgcttactggcttgagtcagccctttctgtcgcataccgtgcagcttgcccgaggctgcccaggtttctgcactgagagtcccaaacaaactgggcagttggtgaatgagct

SEQ ID NO: 21750 - DNA, 122 bp, Homo sapiens
  misc_feature (61)..(62): /note="This region represents a CpG dinucleotide"
  misc_feature (61)..(61): /note="Nucleotide may be methylated to form 5-methylcytosine"
ctctaaagaatagaagttgaggaaaaaattggagatgggggatgtagggggaaattagagcgatgaggaaactatacaagcttgagaaaagaatttctatttactagggaggaaatgagaga

SEQ ID NO: 21751 - DNA, 122 bp, Homo sapiens
  misc_feature (61)..(62): /note="This region represents a CpG dinucleotide"
  misc_feature (61)..(61): /note="Nucleotide may be methylated to form 5-methylcytosine"
cgcgactaaagaggggactggttttgatgacagtgatttatcgcctcagcacagcacgcacgggacgctgtctctccaagcgatttgaccagagcatcccgtcctcgcctcctgtccaaacc

SEQ ID NO: 21752 - DNA, 122 bp, Homo sapiens
  misc_feature (61)..(62): /note="This region represents a CpG dinucleotide"
  misc_feature (61)..(61): /note="Nucleotide may be methylated to form 5-methylcytosine"
atctcatttagcacttcagagaaatgtgttacctgatgcatttattttatatgaaacagacgtaatatgttacaaaagggctgttggtaaatcactaagcttaggagcctggttccgttgtt

SEQ ID NO: 21753 - DNA, 122 bp, Homo sapiens
  misc_feature (61)..(62): /note="This region represents a CpG dinucleotide"
  misc_feature (61)..(61): /note="Nucleotide may be methylated to form 5-methylcytosine"
tgtggaaagcacttacttttaaagaggatgaacatttttcaattattacacattgtttttcgggttagtctaaactcgatgggcataacaagactctgtatcatgtctaatattgtttcttc

SEQ ID NO: 21754 - DNA, 122 bp, Homo sapiens
  misc_feature (61)..(62): /note="This region represents a CpG dinucleotide"
  misc_feature (61)..(61): /note="Nucleotide may be methylated to form 5-methylcytosine"
taaacatcctggctctaatttggatagttatgaatactgttcctttcatcctctctcatacgtctcctccacccgcaagccatttcctctgtacggtcttctgtcagtctaatgaaagtttc

SEQ ID NO: 21755 - DNA, 122 bp, Homo sapiens
  misc_feature (61)..(62): /note="This region represents a CpG dinucleotide"
  misc_feature (61)..(61): /note="Nucleotide may be methylated to form 5-methylcytosine"
aggaacggggttcttagcctctctggccttggtgcacttgtctgctcccaggacgtttctcgatggctctccccgaggactgggagtacccagcctggtgcctccaccctgtcttagcacag

SEQ ID NO: 21756 - DNA, 122 bp, Homo sapiens
  misc_feature (61)..(62): /note="This region represents a CpG dinucleotide"
  misc_feature (61)..(61): /note="Nucleotide may be methylated to form 5-methylcytosine"
ttgcacacatttactttgtgcaatgcattgtattcagtattggagaaataactgcatcctcgggaattcaagtctggagagatataaacaaacaattgagaggtgtttacaatatgacatag

SEQ ID NO: 21757 - DNA, 122 bp, Homo sapiens
  misc_feature (61)..(62): /note="This region represents a CpG dinucleotide"
  misc_feature (61)..(61): /note="Nucleotide may be methylated to form 5-methylcytosine"
cttgtgtcttagataatatgcctgcccctaagcttagaattcagctacagacacaggttccggtgactcaataagaaagagatttaagacttcctttgattacccagttatccacttggtta

SEQ ID NO: 21758 - DNA, 122 bp, Homo sapiens
  misc_feature (61)..(62): /note="This region represents a CpG dinucleotide"
  misc_feature (61)..(61): /note="Nucleotide may be methylated to form 5-methylcytosine"
gtgtttgtgccgcagattaagtgtcttcctccagggagtttgtcctctggcactggcagacgcatcgcctgctgagagaggaagtgtgtttgggccaacttcaggaggagctttggaatctg

SEQ ID NO: 21759 - DNA, 122 bp, Homo sapiens
  misc_feature (61)..(62): /note="This region represents a CpG dinucleotide"
  misc_feature (61)..(61): /note="Nucleotide may be methylated to form 5-methylcytosine"
tggaagaggaggctgtcagtgctgattaactcattctgatcatgcacctttctagatcatcgtaggtcctgaaccaggaagtggggagaagtaagatcaaatcaggggtaggtaaactacag

SEQ ID NO: 21760 - DNA, 122 bp, Homo sapiens
  misc_feature (61)..(62): /note="This region represents a CpG dinucleotide"
  misc_feature (61)..(61): /note="Nucleotide may be methylated to form 5-methylcytosine"
aaggattttggtgtgggtgtctgaccagacgttcaggtttaaagtctcatggtgaatatgcgtggtgtagtaagcagagctgaagaggccattgacaggatcaatcaaaggttttttaaaaa

SEQ ID NO: 21761 - DNA, 122 bp, Homo sapiens
  misc_feature (61)..(62): /note="This region represents a CpG dinucleotide"
  misc_feature (61)..(61): /note="Nucleotide may be methylated to form 5-methylcytosine"
tcaagcgattctcctgcctcagcctccccagcagctggggactacaggcgtgcgccaccacgcccagctaatttttgtattaatcaaagacgcatttcaacgcagaggaggaagtgctagcg

SEQ ID NO: 21762 - DNA, 122 bp, Homo sapiens
  misc_feature (61)..(62): /note="This region represents a CpG dinucleotide"
  misc_feature (61)..(61): /note="Nucleotide may be methylated to form 5-methylcytosine"
tgaatgcggccccagatagcaatggctaattggtgactggagctaataacattggccgagcgagcagggcagataaggaagggaaagaaaatccactaatagccttgccatctatctggaaa

SEQ ID NO: 21763 - DNA, 122 bp, Homo sapiens
  misc_feature (61)..(62): /note="This region represents a CpG dinucleotide"
  misc_feature (61)..(61): /note="Nucleotide may be methylated to form 5-methylcytosine"
aaaaaatctataaggaacggctggccctgtacagatttttcaatgatgtcaccacagaaacggctgaaatgtcacataattagtgaaggtggctgcttccttgtgtgatatgagggacctca

SEQ ID NO: 21764 - DNA, 122 bp, Homo sapiens
  misc_feature (61)..(62): /note="This region represents a CpG dinucleotide"
  misc_feature (61)..(61): /note="Nucleotide may be methylated to form 5-methylcytosine"
ctggacagcttccgggaaaacttcccaaagcaaagctttcaccagaattgcacatgaccacgatcacactggccacagggaactgctgagaatgtctctctccacctggttttcttgacctc

SEQ ID NO: 21765 - DNA, 122 bp, Homo sapiens
  misc_feature (61)..(62): /note="This region represents a CpG dinucleotide"
  misc_feature (61)..(61): /note="Nucleotide may be methylated to form 5-methylcytosine"
tgccactcatttttgcatttccagagcaaagcatagtatctggcactagctaatgtgtgtcgtagtatatgtgtgtcgagtgagctaaaggtgtacaatgaggacccaagtgagcagggcac

SEQ ID NO: 21766 - DNA, 122 bp, Homo sapiens
  misc_feature (61)..(62): /note="This region represents a CpG dinucleotide"
  misc_feature (61)..(61): /note="Nucleotide may be methylated to form 5-methylcytosine"
ttattcaagaaattgtgcagaataggtgtcctcttcagtaagtgccatgctaggggcatacgactgtgaacaagacaagcagggcgtctgccttactgagcttccagaatgactaataagca

SEQ ID NO: 21767 - DNA, 122 bp, Homo sapiens
  misc_feature (61)..(62): /note="This region represents a CpG dinucleotide"
  misc_feature (61)..(61): /note="Nucleotide may be methylated to form 5-methylcytosine"
tttttccgctgagttctgtccgcagaaaccgttctctggaacagtgcagattgcagattacgtttactacctccgccatgtcccgcccttcagatgtttgaagatgactcttagattccagt

SEQ ID NO: 21768 - DNA, 122 bp, Homo sapiens
  misc_feature (61)..(62): /note="This region represents a CpG dinucleotide"
  misc_feature (61)..(61): /note="Nucleotide may be methylated to form 5-methylcytosine"
tttgaaataaatttccccggaacagctcgcccctctcaacaggactctgaggctccactacgttgctgttattcctgacagagtgatgaaaggaaatttaaacaagtggcattttgtaaaac

SEQ ID NO: 21769 - DNA, 122 bp, Homo sapiens
  misc_feature (61)..(62): /note="This region represents a CpG dinucleotide"
  misc_feature (61)..(61): /note="Nucleotide may be methylated to form 5-methylcytosine"
ctccgcggactagatcctgatttggggccttcctacatcttcctttacggggtccaagaccggcaatctgggagttccacaggctatctagggttatctggcctcccctccgttttccctcc

SEQ ID NO: 21770 - DNA, 122 bp, Homo sapiens
  misc_feature (61)..(62): /note="This region represents a CpG dinucleotide"
  misc_feature (61)..(61): /note="Nucleotide may be methylated to form 5-methylcytosine"
tctgctcttgcagcatggggtcactggggagaatgtttgcctgagtcagtggcgcctctgcgttgcgccataggatttctggcccaactccccaactgtggagaggaaccacacttggtatt

SEQ ID NO: 21771 - DNA, 122 bp, Homo sapiens
  misc_feature (61)..(62): /note="This region represents a CpG dinucleotide"
  misc_feature (61)..(61): /note="Nucleotide may be methylated to form 5-methylcytosine"
ctgggggtggggtggggataccttgacaggaatctccgagctgacttggttctctgtgtgcgcctatctcctaggacacatcagtcaacacaggcttggagcctgtcagagctagaaggtgc

SEQ ID NO: 21772 - DNA, 122 bp, Homo sapiens
  misc_feature (61)..(62): /note="This region represents a CpG dinucleotide"
  misc_feature (61)..(61): /note="Nucleotide may be methylated to form 5-methylcytosine"
ggttctctgcctcagtggctattcatacccatcctgaagaagaccaggtctcccagttgacgggagttactgactcacagtctagatgaggatttgtattgggcagagctgactcggtaatt

SEQ ID NO: 21773 - DNA, 122 bp, Homo sapiens
  misc_feature (61)..(62): /note="This region represents a CpG dinucleotide"
  misc_feature (61)..(61): /note="Nucleotide may be methylated to form 5-methylcytosine"
caaggcagtgtcatattaattctcagttaaccctcctaagtagcctaacaagttaggtggcgtagagattattatctccattttacaaataagaaaactgaggctcagagactagaagcgat

SEQ ID NO: 21774 - DNA, 122 bp, Homo sapiens
  misc_feature (61)..(62): /note="This region represents a CpG dinucleotide"
  misc_feature (61)..(61): /note="Nucleotide may be methylated to form 5-methylcytosine"
aaatacttctcagtctggtgaaaacactcagcagtgtgtttaaatgactcagccacccagcggcagtgctcagagggccagtgaagttactcactgaaactagagtaatgcttatcagtcta

SEQ ID NO: 21775 - DNA, 122 bp, Homo sapiens
  misc_feature (61)..(62): /note="This region represents a CpG dinucleotide"
  misc_feature (61)..(61): /note="Nucleotide may be methylated to form 5-methylcytosine"
ctcctccacctccaggcacagccatctcctggatcttgtaaatgttgcagaacatctcatcgtggctgatgaggtcctggtgaataatcataattgcggctgaagggagaggcagcggggct

SEQ ID NO: 21776 - DNA, 122 bp, Homo sapiens
  misc_feature (61)..(62): /note="This region represents a CpG dinucleotide"
  misc_feature (61)..(61): /note="Nucleotide may be methylated to form 5-methylcytosine"
aagctgaacttatcaccagagggactatgcaggctgaagtttctgtttctgtttcggttacgtatagaagcagttgctttctaagaattgaaggacacctagtcatatccttttggtcagtg

SEQ ID NO: 21777 - DNA, 122 bp, Homo sapiens
  misc_feature (61)..(62): /note="This region represents a CpG dinucleotide"
  misc_feature (61)..(61): /note="Nucleotide may be methylated to form 5-methylcytosine"
aatctcacttctgctttcaacatttcttaccaaatccagtttctaggacacaaatcattccgcaacccctccttccaatttctaatcctattttaatcactgaaatgggcagagtcagattt

SEQ ID NO: 21778 - DNA, 122 bp, Homo sapiens
  misc_feature (61)..(62): /note="This region represents a CpG dinucleotide"
  misc_feature (61)..(61): /note="Nucleotide may be methylated to form 5-methylcytosine"
caagcatggttctctaataaccacctgcacctctgctgcaatgtaaacagcagatgtgggcgcagggtgagaagggagaggaagctacgtgcaatggcaggttggggaataaggaggcagag

SEQ ID NO: 21779 - DNA, 122 bp, Homo sapiens
  misc_feature (61)..(62): /note="This region represents a CpG dinucleotide"
  misc_feature (61)..(61): /note="Nucleotide may be methylated to form 5-methylcytosine"
caagcaatttgcccacctcagcctcccaaagtgctggggattagacatgagccactgtcacggcctaatcttgatatttgaaacacatgataggcgttcctcagtcttgctttcaaaggtac

SEQ ID NO: 21780 - DNA, 122 bp, Homo sapiens
  misc_feature (61)..(62): /note="This region represents a CpG dinucleotide"
  misc_feature (61)..(61): /note="Nucleotide may be methylated to form 5-methylcytosine"
ctcaagtgtgtagctatgtctccatcgttgttatgagtcacctctctctgaataaggaaacggaggcaaattacttgcagtgagctctctgtttagatagcagctaaagtcaaatctcttca

SEQ ID NO: 21781 - DNA, 122 bp, Homo sapiens
  misc_feature (61)..(62): /note="This region represents a CpG dinucleotide"
  misc_feature (61)..(61): /note="Nucleotide may be methylated to form 5-methylcytosine"
ctccctggcgtgccacagcatgaggctgtctgctctggtggatgccgtgggccatggatgcgcctccatctccgcacagtgcagccggtctagctccctaagccgccaggctctgtgcccaa

SEQ ID NO: 21782 - DNA, 122 bp, Homo sapiens
  misc_feature (61)..(62): /note="This region represents a CpG dinucleotide"
  misc_feature (61)..(61): /note="Nucleotide may be methylated to form 5-methylcytosine"
gcgcattcccagtctcgcgcccgccgcctcctccagcttggtagccgccagcgtgctctacggtgtttttgtttgttttttaccagctgattcacaactcaagtagcacagtgaaggtggac

SEQ ID NO: 21783 - DNA, 122 bp, Homo sapiens
  misc_feature (61)..(62): /note="This region represents a CpG dinucleotide"
  misc_feature (61)..(61): /note="Nucleotide may be methylated to form 5-methylcytosine"
gccaggtaagtggagtcaagatatgctttcaatcttattagaaaccatctgttaagtccacgtgtcatgtggctgaccagaaagcagttatagccaatgacacagatctgctcttaggggaa

SEQ ID NO: 21784 - DNA, 122 bp, Homo sapiens
  misc_feature (61)..(62): /note="This region represents a CpG dinucleotide"
  misc_feature (61)..(61): /note="Nucleotide may be methylated to form 5-methylcytosine"
cagtcagcgaacaatgctatctgcacgtggtggcgcccaaaatacggctgtcatttatttcgttatatgaaattagagcacgccttgtagccataatgaatcatttccttcctgcctgggcc

SEQ ID NO: 21785 - DNA, 122 bp, Homo sapiens
  misc_feature (61)..(62): /note="This region represents a CpG dinucleotide"
  misc_feature (61)..(61): /note="Nucleotide may be methylated to form 5-methylcytosine"
tgacactgacaaaaccagcctgttttaaaacatgcaatgaacacaccaaactatgtgactcgtgcaggtacgaatgaattcaatttttctacacccacattcttaggcccaaaaataactca

SEQ ID NO: 21786 - DNA, 122 bp, Homo sapiens
  misc_feature (61)..(62): /note="This region represents a CpG dinucleotide"
  misc_feature (61)..(61): /note="Nucleotide may be methylated to form 5-methylcytosine"
cggatgcacagacacacactcacacacttaattacagcccggcacaccaactgcctctaacgctttgacatagaaattaatctagagacggaagacagagcataaataaggaaaataaacaa

SEQ ID NO: 21787 - DNA, 122 bp, Homo sapiens
  misc_feature (61)..(62): /note="This region represents a CpG dinucleotide"
  misc_feature (61)..(61): /note="Nucleotide may be methylated to form 5-methylcytosine"
caattcttacttggcccagtgccttgaatgtggctatgtatgcaataaatatttgtcgaacgaacgattaaacgaatagtagtgttggcaggcagtatagtattatgtaaagagcatgcaca

SEQ ID NO: 21788 - DNA, 122 bp, Homo sapiens
  misc_feature (61)..(62): /note="This region represents a CpG dinucleotide"
  misc_feature (61)..(61): /note="Nucleotide may be methylated to form 5-methylcytosine"
cggctgtttctaagttatttaaagatttagaaagtagctagaaggtcactgggtttgtggcggcattggcttttaagcttgtgcaataaaaccacattcggcttgttccctaaggtgagggc

SEQ ID NO: 21789 - DNA, 122 bp, Homo sapiens
  misc_feature (61)..(62): /note="This region represents a CpG dinucleotide"
  misc_feature (61)..(61): /note="Nucleotide may be methylated to form 5-methylcytosine"
gtacattccactttccttaataggaacatccttccctaatctttcaagtctaaagataaacgtcacctctttagaaagcagtgcagtaagtgtccttaccttctccccaccctccttctgca

SEQ ID NO: 21790 - DNA, 122 bp, Homo sapiens
  misc_feature (61)..(62): /note="This region represents a CpG dinucleotide"
  misc_feature (61)..(61): /note="Nucleotide may be methylated to form 5-methylcytosine"
gaggactcgccaggcaggtgctgtgtggggctgggggcccaggctgcaaacccagcaggacggggagggccaggatgggtgttcagtgtgaggttggccaggcagtcccagtctctggctgc

SEQ ID NO: 21791 - DNA, 122 bp, Homo sapiens
  misc_feature (61)..(62): /note="This region represents a CpG dinucleotide"
  misc_feature (61)..(61): /note="Nucleotide may be methylated to form 5-methylcytosine"
cagtggctcgcatgggccttcttatctccttggcccagctgaatcttggtgagctggtagcgagttatgatctgggcatcctggaggagccagcttccagggtagcatcaattgctgggagg

SEQ ID NO: 21792 - DNA, 122 bp, Homo sapiens
  misc_feature (61)..(62): /note="This region represents a CpG dinucleotide"
  misc_feature (61)..(61): /note="Nucleotide may be methylated to form 5-methylcytosine"
tctgggtggaccaaggccacgtagtcattgcaggtggtgacattgcccaaggctgagagccgctcctccacccgcctaatctgcactgtgtctgggaggctgttgcgaatgtgttgcagctc

SEQ ID NO: 21793 - DNA, 122 bp, Homo sapiens
  misc_feature (61)..(62): /note="This region represents a CpG dinucleotide"
  misc_feature (61)..(61): /note="Nucleotide may be methylated to form 5-methylcytosine"
aagcttagccagaagggtttatcccaaacaaagcaatgcacattggcattggaatgaaagcggacaggcaaatgggggaagcaagtcaaaaactttgcagttaccagagcggcattgcagag

SEQ ID NO: 21794 - DNA, 122 bp, Homo sapiens
  misc_feature (61)..(62): /note="This region represents a CpG dinucleotide"
  misc_feature (61)..(61): /note="Nucleotide may be methylated to form 5-methylcytosine"
agggctgagtaggtggagtatgtgactatgtaaataaacctccctgactgggtgaggcagcgccctctctggagtcagtgtgcaaggatgttagtgaaagctgctcttttttttttcctcct

SEQ ID NO: 21795 - DNA, 122 bp, Homo sapiens
  misc_feature (61)..(62): /note="This region represents a CpG dinucleotide"
  misc_feature (61)..(61): /note="Nucleotide may be methylated to form 5-methylcytosine"
tttcccccacttggcatcgcctctaggcagccaaggttctgtgctctttttgttggagagcgtgatcctggcatgactggctctgagcttccctgttggctgttgccaccattccgcagcag

SEQ ID NO: 21796 - DNA, 122 bp, Homo sapiens
  misc_feature (61)..(62): /note="This region represents a CpG dinucleotide"
  misc_feature (61)..(61): /note="Nucleotide may be methylated to form 5-methylcytosine"
cttaatcactgttactgctctcccaagcagcacattctttcagcttggattttgacaatacgttctttgtcagaggaatgctgcaaagagggtgaaaggggctgctattgccagaacagttc

SEQ ID NO: 21797 - DNA, 122 bp, Homo sapiens
  misc_feature (61)..(62): /note="This region represents a CpG dinucleotide"
  misc_feature (61)..(61): /note="Nucleotide may be methylated to form 5-methylcytosine"
aaaagaaagaaagaaaaggaagggaaggaaggaagggagaaagaaagaaagataatgtcacggtatgaccatatgcatggcatttgaaatattgttgagtcatagcttcatcactgggatgt

SEQ ID NO: 21798 - DNA, 122 bp, Homo sapiens
  misc_feature (61)..(62): /note="This region represents a CpG dinucleotide"
  misc_feature (61)..(61): /note="Nucleotide may be methylated to form 5-methylcytosine"
atttccttgtcatgtgatgctataccaaagtcaggttgaaaagtaagccacattatgctgcgttaagaaaagaaacctggtcaagtagccaagatggccaaataggaacagctccagtctac

SEQ ID NO: 21799 - DNA, 122 bp, Homo sapiens
  misc_feature (61)..(62): /note="This region represents a CpG dinucleotide"
  misc_feature (61)..(61): /note="Nucleotide may be methylated to form 5-methylcytosine"
gaaatggcctaatcatttcccctggtgactaacgctgcccaccacacaccaattcccctgcggtgggttaaccactgtggcagcacagctgtgtgcagctctcacacctaaacgtcccacag

SEQ ID NO: 21800 - DNA, 122 bp, Homo sapiens
  misc_feature (61)..(62): /note="This region represents a CpG dinucleotide"
  misc_feature (61)..(61): /note="Nucleotide may be methylated to form 5-methylcytosine"
aaaaaataataacaataataataatgactactttgtagggagctttttgagaaatgaatgcgggaacacataaaagtagttagtatagtgccaggcacactataagctctcaataaatgtga

SEQ ID NO: 21801 - DNA, 122 bp, Homo sapiens
  misc_feature (61)..(62): /note="This region represents a CpG dinucleotide"
  misc_feature (61)..(61): /note="Nucleotide may be methylated to form 5-methylcytosine"
gtattctctggttattctgggatcatttcattcaagacctccccatccctggcaccaactcgacataccagaatcctggtctgtagacaaagctgtggttctggggcagcacagagctgttt

SEQ ID NO: 21802 - DNA, 122 bp, Homo sapiens
  misc_feature (61)..(62): /note="This region represents a CpG dinucleotide"
  misc_feature (61)..(61): /note="Nucleotide may be methylated to form 5-methylcytosine"
atagggaacttacattgaacaaggtttgcgtctcttggtgttatttccctaaaagtgagacgacacagggaccattattatcaaggaggggacagagtagaaccctgacaccatatgtcgcc

SEQ ID NO: 21803 - DNA, 122 bp, Homo sapiens
  misc_feature (61)..(62): /note="This region represents a CpG dinucleotide"
  misc_feature (61)..(61): /note="Nucleotide may be methylated to form 5-methylcytosine"
tggctgtggagggttggagtggagggcaggttgttccccacattcttccttctctgcccacgagtcagccctgagcagagattcagggtcctgtcctgtctagcctggcttttggtttccct

SEQ ID NO: 21804 - DNA, 122 bp, Homo sapiens
  misc_feature (61)..(62): /note="This region represents a CpG dinucleotide"
  misc_feature (61)..(61): /note="Nucleotide may be methylated to form 5-methylcytosine"
agtagaatttgctgcgggagagctcactctagaaggggttctcaacgtctggcttccagacgagcagcaacagcattcactgggaacttgcataagtggaaattaggtgttgctcagcctta

SEQ ID NO: 21805 - DNA, 122 bp, Homo sapiens
  misc_feature (61)..(62): /note="This region represents a CpG dinucleotide"
  misc_feature (61)..(61): /note="Nucleotide may be methylated to form 5-methylcytosine"
acctgattttgttcttttgtattacccactgttcccagatgtgggaactgaggctcacagcggttatctcagcaggtttatgagccagagttgtcccacccaggagagttttggaagtgaga

SEQ ID NO: 21806 - DNA, 122 bp, Homo sapiens
  misc_feature (61)..(62): /note="This region represents a CpG dinucleotide"
  misc_feature (61)..(61): /note="Nucleotide may be methylated to form 5-methylcytosine"
ttcactatccagtaagtttttcagcacttactgaatcattcccatggactaacttcagcccgccttccagtgaatttctcagctgcctactacatactttttgtgaaccagttacaactaaa

SEQ ID NO: 21807 - DNA, 122 bp, Homo sapiens
  misc_feature (61)..(62): /note="This region represents a CpG dinucleotide"
  misc_feature (61)..(61): /note="Nucleotide may be methylated to form 5-methylcytosine"
tcatgggatggcacagggatgcgtggaccctgccagggttgcatgaaacagctaggcagccgcgggagttggcacatgtgtgctgagcactgtgaaagaaacacagagacagaaggctgcag

SEQ ID NO: 21808 - DNA, 122 bp, Homo sapiens
  misc_feature (61)..(62): /note="This region represents a CpG dinucleotide"
  misc_feature (61)..(61): /note="Nucleotide may be methylated to form 5-methylcytosine"
caatgagcaataatgttgctcatagtaacattatctgtgatggccaaaaggcgtacagaacgcacatgtgcattaacagataaatggatgaacaaaatgtgctatattgtatacctacaata

SEQ ID NO: 21809 - DNA, 122 bp, Homo sapiens
  misc_feature (61)..(62): /note="This region represents a CpG dinucleotide"
  misc_feature (61)..(61): /note="Nucleotide may be methylated to form 5-methylcytosine"
ataattttgttttcctcagcctcaatttcctaaaataagcccagaggtcccctctagtttcgaaacaactagatgtttattgttacatattctcacttcactgaatgacagaaaggatttat

SEQ ID NO: 21810 - DNA, 122 bp, Homo sapiens
  misc_feature (61)..(62): /note="This region represents a CpG dinucleotide"
  misc_feature (61)..(61): /note="Nucleotide may be methylated to form 5-methylcytosine"
tcacaaggagcatggctgtcatggcacaagatgctcctggcaggggtgagtctgcagaggcggcagccacaaagccttcatctgccaggagaaggtgtctggacctgatcccaaagttgtgg

SEQ ID NO: 21811 - DNA, 122 bp, Homo sapiens
  misc_feature (61)..(62): /note="This region represents a CpG dinucleotide"
  misc_feature (61)..(61): /note="Nucleotide may be methylated to form 5-methylcytosine"
ttgagtttatgctaatgaggtgactcaaggtagtgcctcagatagttcaggaggaggtctcgtcactggaaagaccaaacacctgattagagggttaagactttcagcctcatacctgacct

SEQ ID NO: 21812 - DNA, 122 bp, Homo sapiens
  misc_feature (61)..(62): /note="This region represents a CpG dinucleotide"
  misc_feature (61)..(61): /note="Nucleotide may be methylated to form 5-methylcytosine"
gattttttttttttttcctggtgcggaaaggcctggtggtctctgggactctccagttatcgagcgttcccaccctacagcgtccgcccaggcgcaggcctgcccctagttcaggagtgaac

SEQ ID NO: 21813 - DNA, 122 bp, Homo sapiens
  misc_feature (61)..(62): /note="This region represents a CpG dinucleotide"
  misc_feature (61)..(61): /note="Nucleotide may be methylated to form 5-methylcytosine"
gcccccttgcccatcacaaaatgccttcctcttcctgggttcctgcaccctgcctgcccacgcctattgagaaagcctttccgccagggccaggactagagtgaaacatgtgaggcattcac

SEQ ID NO: 21814 - DNA, 122 bp, Homo sapiens
  misc_feature (61)..(62): /note="This region represents a CpG dinucleotide"
  misc_feature (61)..(61): /note="Nucleotide may be methylated to form 5-methylcytosine"
tgaaggcttgaaccaggcagaacattttccctcaagttttggaatcatacatctgaaacacgtgatggaaacccaggcccattatctggtgaatggtttttctgataagagatgtaaatgtt

SEQ ID NO: 21815 - DNA, 122 bp, Homo sapiens
  misc_feature (61)..(62): /note="This region represents a CpG dinucleotide"
  misc_feature (61)..(61): /note="Nucleotide may be methylated to form 5-methylcytosine"
tcctggcttccacctgcactcgccgtgattctgagggctactgaccccagcctggtgctgcgtttgggctcaaaaaattgcaatgctgtcaagctgcagaatctctattgcccaacagatac

SEQ ID NO: 21816 - DNA, 122 bp, Homo sapiens
  misc_feature (61)..(62): /note="This region represents a CpG dinucleotide"
  misc_feature (61)..(61): /note="Nucleotide may be methylated to form 5-methylcytosine"
aaaaaaaaaaaaaaaagaaaatagagataaagacaggaagtgaatgcataaaaaacaaagcgcatgattaagcaatcacagtcacatggcaagaaggcgtgggaatcatcatgtcccctgtt

SEQ ID NO: 21817 - DNA, 122 bp, Homo sapiens
  misc_feature (61)..(62): /note="This region represents a CpG dinucleotide"
  misc_feature (61)..(61): /note="Nucleotide may be methylated to form 5-methylcytosine"
ggaggtgctgttccatcaccaggtaagggtccctggagtccctgtccatgtggctctgtgcgtgaacctgaggcttccagagctgagaacacttccttagcctttaagttgcattccatcct

SEQ ID NO: 21818 - DNA, 122 bp, Homo sapiens
  misc_feature (61)..(62): /note="This region represents a CpG dinucleotide"
  misc_feature (61)..(61): /note="Nucleotide may be methylated to form 5-methylcytosine"
gaaaagcacgagttcatgttgtttcactaccacttttctatccatttcttggcctagagccgtttctttactaccataactgccaacactatctccataaacaaagaatcttatgtctggag

SEQ ID NO: 21819 - DNA, 122 bp, Homo sapiens
  misc_feature (61)..(62): /note="This region represents a CpG dinucleotide"
  misc_feature (61)..(61): /note="Nucleotide may be methylated to form 5-methylcytosine"
cagtcttttgtgtgcctgtgaggtcctgggcaagctgtggagctgtaaatatttgcccttcgcccagagctggccagctgctgagactgcagctgacagacaggccaggggccaggaagggg

SEQ ID NO: 21820 - DNA, 122 bp, Homo sapiens
  misc_feature (61)..(62): /note="This region represents a CpG dinucleotide"
  misc_feature (61)..(61): /note="Nucleotide may be methylated to form 5-methylcytosine"
tgaacacagtcatataaatgaagtggtttctgctctgctgacaaataaatgccctttgtccgttttaattctttcaacatatggaacaataaaatgaatgaaagatggtatgcaaatgagtc

SEQ ID NO: 21821 - DNA, 122 bp, Homo sapiens
  misc_feature (61)..(62): /note="This region represents a CpG dinucleotide"
  misc_feature (61)..(61): /note="Nucleotide may be methylated to form 5-methylcytosine"
agacatacaatgaccaggaaaacatctgcctgttgctttctcacctgtgtatttatctaccgattacaatgtgacacagaaaagggatattgggtagaaaaaatatatagccaagtcaaaat

SEQ ID NO: 21822 - DNA, 122 bp, Homo sapiens
  misc_feature (61)..(62): /note="This region represents a CpG dinucleotide"
  misc_feature (61)..(61): /note="Nucleotide may be methylated to form 5-methylcytosine"
cggcatctgcataaattggttaatgggtgctgttgaagagagtgtgatttgtccaatggccgaactcaggagtccttgagtacttgacccaggaagacaggggagagtaggcttagcaatta

SEQ ID NO: 21823 - DNA, 122 bp, Homo sapiens
  misc_feature (61)..(62): /note="This region represents a CpG dinucleotide"
  misc_feature (61)..(61): /note="Nucleotide may be methylated to form 5-methylcytosine"
atgtgcacaaagttgttgtggtattcccttactatccttttaatgcaagcttgtccaacccgctgtccgtgggccacatgtggctccggacagcttggaatgcagcccaacacaaattcgta

SEQ ID NO: 21824 - DNA, 122 bp, Homo sapiens
  misc_feature (61)..(62): /note="This region represents a CpG dinucleotide"
  misc_feature (61)..(61): /note="Nucleotide may be methylated to form 5-methylcytosine"
tcttgataataacttatgttgttcttattcctagtaattgctggcctccttatgaccttccgcctagtttcaggcagtagctaggagagctagactaactgctccagagaagtgaggccaag

SEQ ID NO: 21825 - DNA, 122 bp, Homo sapiens
  misc_feature (61)..(62): /note="This region represents a CpG dinucleotide"
  misc_feature (61)..(61): /note="Nucleotide may be methylated to form 5-methylcytosine"
taggtcaggaactctgaagggccaatgtttgagatcttgttttggaaggaatttcagcaacggtagctgggcagaaggctgacccaccaacatattttagcaaagctacaaggatttggaat

SEQ ID NO: 21826 - DNA, 122 bp, Homo sapiens
  misc_feature (61)..(62): /note="This region represents a CpG dinucleotide"
  misc_feature (61)..(61): /note="Nucleotide may be methylated to form 5-methylcytosine"
ttcctgatgcgtttgaatcaggaagccttttgggcagaacttccattagcatcagcccaccgcggcccacactacacacggtcgtgacacatgtattaaaggctgagttgcaattgtgttcc

SEQ ID NO: 21827 - DNA, 122 bp, Homo sapiens
  misc_feature (61)..(62): /note="This region represents a CpG dinucleotide"
  misc_feature (61)..(61): /note="Nucleotide may be methylated to form 5-methylcytosine"
ttgcttagttcagatggtggacataagcacaggctactctagattccctcaaacactccccgactaataatactgaagaatttctcgggaagcagcaggcctgtcaaggaaggactatgttc

SEQ ID NO: 21828 - DNA, 122 bp, Homo sapiens
  misc_feature (61)..(62): /note="This region represents a CpG dinucleotide"
  misc_feature (61)..(61): /note="Nucleotide may be methylated to form 5-methylcytosine"
gtttttgtaaattaaactcttcattgcaattcccctgtcttgataaatctgctctgtctgcgtatcaggcaaggagaagccattgggtggttacacaagtacttatccactttatgtttcta

SEQ ID NO: 21829 - DNA, 122 bp, Homo sapiens
  misc_feature (61)..(62): /note="This region represents a CpG dinucleotide"
  misc_feature (61)..(61): /note="Nucleotide may be methylated to form 5-methylcytosine"
gtgcagcaaatgaaaacttccttttctgctgaaaaaaatagctgttatcaagctctagagcgttagtgtgagaaccataaccagaggtttcatgaataggtccctgttactaagtccttttc

SEQ ID NO: 21830 - DNA, 122 bp, Homo sapiens
  misc_feature (61)..(62): /note="This region represents a CpG dinucleotide"
  misc_feature (61)..(61): /note="Nucleotide may be methylated to form 5-methylcytosine"
catcccaaggtcttgctcctccacttttaaacctccaaggaaaccaaaaataactcaatacgtagctcagggcttggggaagctaccttcaataccttagaggattatattggaagtgaaaa

SEQ ID NO: 21831 - DNA, 122 bp, Homo sapiens
  misc_feature (61)..(62): /note="This region represents a CpG dinucleotide"
  misc_feature (61)..(61): /note="Nucleotide may be methylated to form 5-methylcytosine"
gcaagcgttttatgatgactgcattgattattgttatcaagatttcaccccttggtctggcgtggtggctcatgcctgtaatctcaacactttgggaggcccaggcaggaggatcacttgag

SEQ ID NO: 21832 - DNA, 122 bp, Homo sapiens
  misc_feature (61)..(62): /note="This region represents a CpG dinucleotide"
  misc_feature (61)..(61): /note="Nucleotide may be methylated to form 5-methylcytosine"
agagatctagtaacaatgaaaagagatgtgaccctgttaagatttatgtaaaaatgtatgcgcatgtgtgtgttggctctaggataaagtgcaaatgttccatggtgtaaaaggaccttcac

SEQ ID NO: 21833 - DNA, 122 bp, Homo sapiens
  misc_feature (61)..(62): /note="This region represents a CpG dinucleotide"
  misc_feature (61)..(61): /note="Nucleotide may be methylated to form 5-methylcytosine"
gctggcggccttgcagcgtgcgtggcaacagcagctgggcccgcaagactcagcacgggacgtcctcgtccaagtctgggccaagagcagcggcccagggggcggggccggccagagggagc

SEQ ID NO: 21834 - DNA, 122 bp, Homo sapiens
  misc_feature (61)..(62): /note="This region represents a CpG dinucleotide"
  misc_feature (61)..(61): /note="Nucleotide may be methylated to form 5-methylcytosine"
ttttcctgaagccaaccgattatgggttttaatcacatctacaaaataccttcctggcaacgcctagatgagtgcttggttgaataactggagactataacctagccaagttgacattgaaa

SEQ ID NO: 21835 - DNA, 122 bp, Homo sapiens
  misc_feature (61)..(62): /note="This region represents a CpG dinucleotide"
  misc_feature (61)..(61): /note="Nucleotide may be methylated to form 5-methylcytosine"
tgctccaaaatgtaatacattttgagcacccacatgatgtcgcaattagaaaatcccacacgtgacctcatatgctgggttgcagtcaaactgcagtcacacaacacagttcattcagcaac

SEQ ID NO: 21836 - DNA, 122 bp, Homo sapiens
  misc_feature (61)..(62): /note="This region represents a CpG dinucleotide"
  misc_feature (61)..(61): /note="Nucleotide may be methylated to form 5-methylcytosine"
actttcctagacaggccagattagctgttctacacgaacgagtaggaccttaaaacacaccgctccccaccttccttctgtgaagaactcaatgcgagattgatcatagtggtgatgacatg

SEQ ID NO: 21837 - DNA, 122 bp, Homo sapiens
  misc_feature (61)..(62): /note="This region represents a CpG dinucleotide"
  misc_feature (61)..(61): /note="Nucleotide may be methylated to form 5-methylcytosine"
ccgtgatcgacgtgaatgtattttctgtctctctctgactttgtccctgctgcctgtttccgtctgtctctttctctgaatccttgactgtctctctggttctctgtgagtcttgccatcgc

SEQ ID NO: 21838 - DNA, 122 bp, Homo sapiens
  misc_feature (61)..(62): /note="This region represents a CpG dinucleotide"
  misc_feature (61)..(61): /note="Nucleotide may be methylated to form 5-methylcytosine"
atcttaggtaacataatggtttgttgccttccaaagggccacaggacatgaaaagatatacgttacggtatatctatgttattaaaatatcatgtggtgggaaactaggaaaaaagatctag

SEQ ID NO: 21839 - DNA, 122 bp, Homo sapiens
  misc_feature (61)..(62): /note="This region represents a CpG dinucleotide"
  misc_feature (61)..(61): /note="Nucleotide may be methylated to form 5-methylcytosine"
ataacgctgccaggtctttcaaatgctgaggcatttcctcatagctccaagtagctgctgcgggtcagattctgcttgaaccgagggttcaattacaacatccgtatgctttccagcccact

SEQ ID NO: 21840 - DNA, 122 bp, Homo sapiens
  misc_feature (61)..(62): /note="This region represents a CpG dinucleotide"
  misc_feature (61)..(61): /note="Nucleotide may be methylated to form 5-methylcytosine"
tctacaacactcttctacgcaccacagtttctggctgaggaggaagtgtgaacaggctggcgtgggcatgtcactctcactgggcctggcagagctggccagctgcaccgcccaatacaggg

SEQ ID NO: 21841 - DNA, 122 bp, Homo sapiens
  misc_feature (61)..(62): /note="This region represents a CpG dinucleotide"
  misc_feature (61)..(61): /note="Nucleotide may be methylated to form 5-methylcytosine"
agccaacaccttggggtagcttttacctttactaacagatctcagcatggtatgctactccgtaccatgagtggctgttaccaatgccatgggttcttgtaatcacccaggatagaaatcaa

SEQ ID NO: 21842 - DNA, 122 bp, Homo sapiens
  misc_feature (61)..(62): /note="This region represents a CpG dinucleotide"
  misc_feature (61)..(61): /note="Nucleotide may be methylated to form 5-methylcytosine"
tggactcactgagttcagccttcactgagaaatgtggaaattgaggctcagagaggtcagcgactcacccaaggccgggtagggcctgaaacccagtcttctgactcctagcccagaacaga

SEQ ID NO: 21843 - DNA, 122 bp, Homo sapiens
  misc_feature (61)..(62): /note="This region represents a CpG dinucleotide"
  misc_feature (61)..(61): /note="Nucleotide may be methylated to form 5-methylcytosine"
aggagaagagtttcccttgctaaggctcctttctcttgcccttaccatgagcagatgctacggcagcagcatctcctggctgcttccagacatagtagacttcaggttggctgatgattttg

SEQ ID NO: 21844 - DNA, 122 bp, Homo sapiens
  misc_feature (61)..(62): /note="This region represents a CpG dinucleotide"
  misc_feature (61)..(61): /note="Nucleotide may be methylated to form 5-methylcytosine"
cagatacaaccgtgtggccctgcatggtgcacagcacctgcttccctggggctgactgtacgtgacacataaactgctgtccatctggtctgtccagctttgggtgttatccccatagggtg

SEQ ID NO: 21845 - DNA, 122 bp, Homo sapiens
  misc_feature (61)..(62): /note="This region represents a CpG dinucleotide"
  misc_feature (61)..(61): /note="Nucleotide may be methylated to form 5-methylcytosine"
tggacacagacatgagagctataaacaatgtgatactatgtcctgttaactcacagagaacggaagggctggaacgggacccagccagcagggtttgtgaccgcctctgctgtgacgtcaca

SEQ ID NO: 21846 - DNA, 122 bp, Homo sapiens
  misc_feature (61)..(62): /note="This region represents a CpG dinucleotide"
  misc_feature (61)..(61): /note="Nucleotide may be methylated to form 5-methylcytosine"
acgcgtcacagtgatgctgtgtcttccccattatggcaacagggctataggcatggagggcgggggtggagggggtgtgaaaagccccaggcagcgtcaggggttgtgctcctgctcctgtt

SEQ ID NO: 21847 - DNA, 122 bp, Homo sapiens
  misc_feature (61)..(62): /note="This region represents a CpG dinucleotide"
  misc_feature (61)..(61): /note="Nucleotide may be methylated to form 5-methylcytosine"
cctgtgtgtggcttttctggccacctccaggctgtcagggagtgctgttagacttttagccgcagcctgccatctggaggaaaggaattggccacttttctgcatttcctgccataaatggg

SEQ ID NO: 21848 - DNA, 122 bp, Homo sapiens
  misc_feature (61)..(62): /note="This region represents a CpG dinucleotide"
  misc_feature (61)..(61): /note="Nucleotide may be methylated to form 5-methylcytosine"
actcacttttaggacattcttatttgctgttccaggctctcggagaggcagcccaagaggcgctgctgctaaaatgactctgggcacggtagagatggggagatacggaaatgaatagcagc

SEQ ID NO: 21849 - DNA, 122 bp, Homo sapiens
  misc_feature (61)..(62): /note="This region represents a CpG dinucleotide"
  misc_feature (61)..(61): /note="Nucleotide may be methylated to form 5-methylcytosine"
agtccctacttgcaggatggtgcattttaacccttcaagtcctacttaacacacctggggcgtgagcatgactttttgcacatctgtaaattagcctcaacctgagtcatttcaacagactc

SEQ ID NO: 21850 - DNA, 122 bp, Homo sapiens
  misc_feature (61)..(62): /note="This region represents a CpG dinucleotide"
  misc_feature (61)..(61): /note="Nucleotide may be methylated to form 5-methylcytosine"
gtctaggagatcatcaacatatcctggagcaggccatagacaactctctctacattgggtcgtccctaaagcctttagaaaacagaccccactccatcgttacagagaaaactcggggctca

SEQ ID NO: 21851 - DNA, 122 bp, Homo sapiens
  misc_feature (61)..(62): /note="This region represents a CpG dinucleotide"
  misc_feature (61)..(61): /note="Nucleotide may be methylated to form 5-methylcytosine"
ggaaagaatctgagttccttcactaaactaagaccgtgggatatgtttgctgtgttccatcgtatcatagtgacatgctttgtaaaggcatgtcacttgatgtacatccagatgtagcttag

SEQ ID NO: 21852 - DNA, 122 bp, Homo sapiens
  misc_feature (61)..(62): /note="This region represents a CpG dinucleotide"
  misc_feature (61)..(61): /note="Nucleotide may be methylated to form 5-methylcytosine"
tctggcaatgatgaacaagcttatccaggctatttctgccatgtcaaagtgagtcatcaccgtagaatatctctatctgattatgggaattatacattgctccatctctggcttgttctgcc

SEQ ID NO: 21853 - DNA, 122 bp, Homo sapiens
  misc_feature (61)..(62): /note="This region represents a CpG dinucleotide"
  misc_feature (61)..(61): /note="Nucleotide may be methylated to form 5-methylcytosine"
cacctgtttattttggccagtttgttagcctgctctttttgtgtgtggttttcccctcttcgtaatagataactataatgcaattagttgtataagtagaagaaacttatgttttccttctt

SEQ ID NO: 21854 - DNA, 122 bp, Homo sapiens
  misc_feature (61)..(62): /note="This region represents a CpG dinucleotide"
  misc_feature (61)..(61): /note="Nucleotide may be methylated to form 5-methylcytosine"
tctttaagctgatagatgaggtccacctgttcatttagtcacacctcatggcttctaagacgttccagatgacgggttatgcaactgtgaatctgagctttgacctctcgcaagttatcttt

SEQ ID NO: 21855 - DNA, 122 bp, Homo sapiens
  misc_feature (61)..(62): /note="This region represents a CpG dinucleotide"
  misc_feature (61)..(61): /note="Nucleotide may be methylated to form 5-methylcytosine"
tgtttcacagtgtgctcatcatgcccgttttagagatgaagaaaaccatggctcagagagcgcctgtcatttgttcgagtcacaacaaattaaatccaggtctgtctggttagttgtaaagg

SEQ ID NO: 21856 - DNA, 122 bp, Homo sapiens
  misc_feature (61)..(62): /note="This region represents a CpG dinucleotide"
  misc_feature (61)..(61): /note="Nucleotide may be methylated to form 5-methylcytosine"
agaatggctcataatcatttgttgtgtactgttttttccaaagacacgtctctgagactacgtcagctgcacctggacatggtcacacgtcaacatcatacagagtggtttctcaggtagca

SEQ ID NO: 21857 - DNA, 122 bp, Homo sapiens
  misc_feature (61)..(62): /note="This region represents a CpG dinucleotide"
  misc_feature (61)..(61): /note="Nucleotide may be methylated to form 5-methylcytosine"
accctggtgacttcctaatccctaaattatactgacttaaactaattccacacttactgccgcagccccacctccagaagggcagtcatggaaggaccctattgttctgggcttcctttctt

SEQ ID NO: 21858 - DNA, 122 bp, Homo sapiens
  misc_feature (61)..(62): /note="This region represents a CpG dinucleotide"
  misc_feature (61)..(61): /note="Nucleotide may be methylated to form 5-methylcytosine"
ttcctccagagcttcctgcctggacttcaaggcagccagcatgtccttcttggccgactgcgagctatctgattcctgagaacctgtcgataaacagtggggttacttggccagctgacagg

SEQ ID NO: 21859 - DNA, 122 bp, Homo sapiens
  misc_feature (61)..(62): /note="This region represents a CpG dinucleotide"
  misc_feature (61)..(61): /note="Nucleotide may be methylated to form 5-methylcytosine"
cgtaatgaccatagtaagaccccatgtacgtggctaatgaggcagtgacccgacgtggctcggaagccctgctggggagatcccgccccgtcaccccagaggcgctctccgacctgcagccc

SEQ ID NO: 21860 - DNA, 122 bp, Homo sapiens
  misc_feature (61)..(62): /note="This region represents a CpG dinucleotide"
  misc_feature (61)..(61): /note="Nucleotide may be methylated to form 5-methylcytosine"
atgattttggaatttagaactaaggttgctgggagctgagccatgttcatggcagaggaacggaacttccctttgtggaagttcctggatcttccagagcctggggagttttcctcttcctt

SEQ ID NO: 21861 - DNA, 122 bp, Homo sapiens
  misc_feature (61)..(62): /note="This region represents a CpG dinucleotide"
  misc_feature (61)..(61): /note="Nucleotide may be methylated to form 5-methylcytosine"
acgtatgtatttcccaaacgtgagttgagtaactggctccagttgttactgatggcatgccgtgcttgtgccatatctgtgttctctgataactgctaaatcaactgctgcctaaagtagtg

SEQ ID NO: 21862 - DNA, 122 bp, Homo sapiens
  misc_feature (61)..(62): /note="This region represents a CpG dinucleotide"
  misc_feature (61)..(61): /note="Nucleotide may be methylated to form 5-methylcytosine"
tgaaagctttttaactatacttataaaattcggttctacctagtacatgatatgcctgttcgtagtattttaacctaacaaagcattttgaactctatcatctgctcctccaagttaggtaa

SEQ ID NO: 21863 - DNA, 122 bp, Homo sapiens
  misc_feature (61)..(62): /note="This region represents a CpG dinucleotide"
  misc_feature (61)..(61): /note="Nucleotide may be methylated to form 5-methylcytosine"
ttcataaattagaagagttgatatcatttcaaaaacaagcacttatggaggaagggctgtcgccaaactgcgcaggctggcctcagcgagccagagcagagctgtgccagcatcttcagcag

SEQ ID NO: 21864 - DNA, 122 bp, Homo sapiens
  misc_feature (61)..(62): /note="This region represents a CpG dinucleotide"
  misc_feature (61)..(61): /note="Nucleotide may be methylated to form 5-methylcytosine"
tagtcattatatcatctagacattgtatgaatgagtcagggaaggtcatctaagatcagacgtgtttgtgccaggatcacctggaggccccccagagttctggatttgactgtgctgaggta

SEQ ID NO: 21865 - DNA, 122 bp, Homo sapiens
  misc_feature (61)..(62): /note="This region represents a CpG dinucleotide"
  misc_feature (61)..(61): /note="Nucleotide may be methylated to form 5-methylcytosine"
tcttcatgctcctccagggcaaactacaccctccttggcaggagcagggagcaagctgagcggtcaaggcagctaaacctgccagccacacagaccagctcacaggactggagagtaatggt

SEQ ID NO: 21866 - DNA, 122 bp, Homo sapiens
  misc_feature (61)..(62): /note="This region represents a CpG dinucleotide"
  misc_feature (61)..(61): /note="Nucleotide may be methylated to form 5-methylcytosine"
tgtcaatggaagaggtgtgaccattcagccacttaaagaggattatggtgttcagctggtcgaaaaggccgcagacacctttcaggtgaaagttaatattgggccgggcgcggtggctcaca

SEQ ID NO: 21867 - DNA, 122 bp, Homo sapiens
  misc_feature (61)..(62): /note="This region represents a CpG dinucleotide"
  misc_feature (61)..(61): /note="Nucleotide may be methylated to form 5-methylcytosine"
ctaaacaggctattaaaatatcacgagaatatcacagagctggaggctattaaaatatcacggaggggctgggcgtggtggctcacgcctgtaatcccagcactttgggaagctgaggcagg

SEQ ID NO: 21868 - DNA, 122 bp, Homo sapiens
  misc_feature (61)..(62): /note="This region represents a CpG dinucleotide"
  misc_feature (61)..(61): /note="Nucleotide may be methylated to form 5-methylcytosine"
tgcatggtgtgtttaacaggactggactctatctttacaattctacaaaatcaggccaggcgcagtggctcatgcctgtaaacacctaacactttgagaggccaagtcaggcggatcacctg

SEQ ID NO: 21869 - DNA, 122 bp, Homo sapiens
  misc_feature (61)..(62): /note="This region represents a CpG dinucleotide"
  misc_feature (61)..(61): /note="Nucleotide may be methylated to form 5-methylcytosine"
tggagtgccactcctgatgggagaggaggcccatgacagtgacagtcatgctagtgatcgcggacaccacaccatgctgcctttgccagctggctccttcagcgagtcctcgcaccaagcct

SEQ ID NO: 21870 - DNA, 122 bp, Homo sapiens
  misc_feature (61)..(62): /note="This region represents a CpG dinucleotide"
  misc_feature (61)..(61): /note="Nucleotide may be methylated to form 5-methylcytosine"
gtgcgtctaggctgtggcctgagtcagagccctgctctttgtcgtggctgagtcatgttccgtgatgtggaggcaccgggttttgtgcgtctccttattcagtggacgttggtgctgtttcc

SEQ ID NO: 21871 - DNA, 122 bp, Homo sapiens
  misc_feature (61)..(62): /note="This region represents a CpG dinucleotide"
  misc_feature (61)..(61): /note="Nucleotide may be methylated to form 5-methylcytosine"
tccttttctcccctggccaggctacacccttctgcctgtgggtaagacagagttttgaagcgtctgtgctcaccctttcctccctaacacaggatgctgtgatcattcaccctatcaaaagg

SEQ ID NO: 21872 - DNA, 122 bp, Homo sapiens
  misc_feature (61)..(62): /note="This region represents a CpG dinucleotide"
  misc_feature (61)..(61): /note="Nucleotide may be methylated to form 5-methylcytosine"
ctttctaattgctacccttagcactcagggatgttttctcggacctcacccagagctatacgtaggatcaaatggaaatacgggatcattaactcagccctggaatgcagtctagcagcatt

SEQ ID NO: 21873 - DNA, 122 bp, Homo sapiens
  misc_feature (61)..(62): /note="This region represents a CpG dinucleotide"
  misc_feature (61)..(61): /note="Nucleotide may be methylated to form 5-methylcytosine"
tattatttctctaggcttttgcaatcagatgctgggttggctggaagctggctggtatagcgtggccatgcagcaggctagtctaggcttagtcacatagtgattgcagggtttcaggaaaa

SEQ ID NO: 21874 - DNA, 122 bp, Homo sapiens
  misc_feature (61)..(62): /note="This region represents a CpG dinucleotide"
  misc_feature (61)..(61): /note="Nucleotide may be methylated to form 5-methylcytosine"
ccaacctcaacaggccagaatgagataatactggattgaaacgtaccagcaggccaggcgcggtggctcacgcctgtaatcccagcactttgggaagctgaggcgagagggtcacaaggtca

SEQ ID NO: 21875 - DNA, 122 bp, Homo sapiens
  misc_feature (61)..(62): /note="This region represents a CpG dinucleotide"
  misc_feature (61)..(61): /note="Nucleotide may be methylated to form 5-methylcytosine"
tatgtctacccaaatctttcacatgaatgttcttagcagcattattcataatagccaaaacgtggaaagaagccaaatgtccatcaactgatgagtaagccaaaaaatgttgtataaaagaa

SEQ ID NO: 21876 - DNA, 122 bp, Homo sapiens
  misc_feature (61)..(62): /note="This region represents a CpG dinucleotide"
  misc_feature (61)..(61): /note="Nucleotide may be methylated to form 5-methylcytosine"
gtataggtccctggcatcctggttcatatctgtgttgctgactacagtgtctgtgatgtccgcatgtccaggcctgtttggggttgcctagcgactcttctggcacagggtgtgtctgtggt

SEQ ID NO: 21877 - DNA, 122 bp, Homo sapiens
  misc_feature (61)..(62): /note="This region represents a CpG dinucleotide"
  misc_feature (61)..(61): /note="Nucleotide may be methylated to form 5-methylcytosine"
aaaaaaaaaagcgtcaaagttcacaagggaaagtctggtctctgaaggcaaagtcacctgcgacatgtcccttacccccggcatcagcccctcttcccctgggtgggctttgccgccctgcc

SEQ ID NO: 21878 - DNA, 122 bp, Homo sapiens
  misc_feature (61)..(62): /note="This region represents a CpG dinucleotide"
  misc_feature (61)..(61): /note="Nucleotide may be methylated to form 5-methylcytosine"
agttggcactcaaaaaatatttgctgaatgaatgtcactattgagtgcccaggtacgtgacgctgtctgtaccagtaacatgagagcccctggaggaagtacagtaaagccagggtaagaga

SEQ ID NO: 21879 - DNA, 122 bp, Homo sapiens
  misc_feature (61)..(62): /note="This region represents a CpG dinucleotide"
  misc_feature (61)..(61): /note="Nucleotide may be methylated to form 5-methylcytosine"
aagctggaacaagaacggcgagcatggttgtaacggccggggatctagcgtgcgcaaagacgacagccgctaggccatttacaggctgccattggcctcacaggtgtctattgttatgattt

SEQ ID NO: 21880 - DNA, 122 bp, Homo sapiens
  misc_feature (61)..(62): /note="This region represents a CpG dinucleotide"
  misc_feature (61)..(61): /note="Nucleotide may be methylated to form 5-methylcytosine"
gcctgctacaaaagtaattcagacagtagcttagtcccaagccaccgaaccgttcctatgcggggagctgtcactgtcacattcagaaagcgtatgcactgtaataacagcaatggaacaca

SEQ ID NO: 21881 - DNA, 122 bp, Homo sapiens
  misc_feature (61)..(62): /note="This region represents a CpG dinucleotide"
  misc_feature (61)..(61): /note="Nucleotide may be methylated to form 5-methylcytosine"
gctctcagaagcttggctttatctgggatttgcactccaaaagttcccaggagccatcagcgtgccacagcacatcacaacaatgcgctcccaggcagggtcactcccacaggcccctgcca

SEQ ID NO: 21882 - DNA, 122 bp, Homo sapiens
  misc_feature (61)..(62): /note="This region represents a CpG dinucleotide"
  misc_feature (61)..(61): /note="Nucleotide may be methylated to form 5-methylcytosine"
gaaaaggaagctcagtcactagaataaagttaagcctcacaactgcttcctcaatttatacgtgataaaaaccagaatgaagcaacagactgcaaaaagtgttgtccatctttttctctcat

SEQ ID NO: 21883 - DNA, 122 bp, Homo sapiens
  misc_feature (61)..(62): /note="This region represents a CpG dinucleotide"
  misc_feature (61)..(61): /note="Nucleotide may be methylated to form 5-methylcytosine"
ttccccaaatgctctggtctcttcaaactttactttttttttttgcattcgataaaggtacgcaattcaatgcaaagaagagctagggaggaaaattgagagcattttagcagacaggtgga

SEQ ID NO: 21884 - DNA, 122 bp, Homo sapiens
  misc_feature (61)..(62): /note="This region represents a CpG dinucleotide"
  misc_feature (61)..(61): /note="Nucleotide may be methylated to form 5-methylcytosine"
cagtctgtccagcttggggacctgcttttcctcctcctaccaggatttggccaagcatgtcgtggacacttctatggctgatgtgagtaactgctcccacccatccctaccattcctttacc

SEQ ID NO: 21885 - DNA, 122 bp, Homo sapiens
  misc_feature (61)..(62): /note="This region represents a CpG dinucleotide"
  misc_feature (61)..(61): /note="Nucleotide may be methylated to form 5-methylcytosine"
gatcatgcctaacttgctactctgctgcaaggactgtagctcattcatttgttcaatgagcgtttactaagcaatgccacatgccagacactacactagacacagactatataacggcaaac

SEQ ID NO: 21886 - DNA, 122 bp, Homo sapiens
  misc_feature (61)..(62): /note="This region represents a CpG dinucleotide"
  misc_feature (61)..(61): /note="Nucleotide may be methylated to form 5-methylcytosine"
ccctgcgctcggcggcagaggcgcccggctggtgaccaggggaagcctcctgggctgacccgtgcacagccacagggaccagcccagacgttctctacagcgggggctgcaagagctagggc

SEQ ID NO: 21887 - DNA, 122 bp, Homo sapiens
  misc_feature (61)..(62): /note="This region represents a CpG dinucleotide"
  misc_feature (61)..(61): /note="Nucleotide may be methylated to form 5-methylcytosine"
taaaaatgaagaagacagttaatgacgtctcctccctgtctgcctcactgggtaagcattcgcccagccaacatctggaacatcccagttctgcaaagagccacacccttcccagaaagagc

SEQ ID NO: 21888 - DNA, 122 bp, Homo sapiens
  misc_feature (61)..(62): /note="This region represents a CpG dinucleotide"
  misc_feature (61)..(61): /note="Nucleotide may be methylated to form 5-methylcytosine"
ctcaggtatgagaaataaaataatctcaaccatactcttctatagagatctgaaactaagcgtggacatcttggcaactggcctttggaaagataatgaaagatctataccataaaatatac

SEQ ID NO: 21889 - DNA, 122 bp, Homo sapiens
  misc_feature (61)..(62): /note="This region represents a CpG dinucleotide"
  misc_feature (61)..(61): /note="Nucleotide may be methylated to form 5-methylcytosine"
acaaacacagatgcattcactcaaggaagagcggccccagggggaagaacaggatggcagcgtcttcacttggggccgctccagccccgaggcgcacagccgtggaaagccggtgacagcac

SEQ ID NO: 21890 - DNA, 122 bp, Homo sapiens
  misc_feature (61)..(62): /note="This region represents a CpG dinucleotide"
  misc_feature (61)..(61): /note="Nucleotide may be methylated to form 5-methylcytosine"
aatccacccagctgatgttgtatatgcctctcaacctgcttggcttgcacaacctgtaagcgcttttgtaatctgcgggcacggctctcaatgtcagcctgtcgccgcagtaaagctgttat

SEQ ID NO: 21891 - DNA, 122 bp, Homo sapiens
  misc_feature (61)..(62): /note="This region represents a CpG dinucleotide"
  misc_feature (61)..(61): /note="Nucleotide may be methylated to form 5-methylcytosine"
cagtgggaagcatacaaagtatggacacactggacaaagggatgattcacataacaggcacgaccagagggacaataagagatttcatcaggatactcaaaagggcacacaatttaaaacat

SEQ ID NO: 21892 - DNA, 122 bp, Homo sapiens
  misc_feature (61)..(62): /note="This region represents a CpG dinucleotide"
  misc_feature (61)..(61): /note="Nucleotide may be methylated to form 5-methylcytosine"
aggcagcagaagcaggtgcttcctgatattaaccagagacggtcctggcacagatggggccgtgtgaatcacatgcagacatacgtatgcactcacgtgcgtgccattattttcatgtggag

SEQ ID NO: 21893 - DNA, 122 bp, Homo sapiens
  misc_feature (61)..(62): /note="This region represents a CpG dinucleotide"
  misc_feature (61)..(61): /note="Nucleotide may be methylated to form 5-methylcytosine"
tttagatgtgggtttacatgttaatcctacaatgttatttcacctcagtggtctgaagtgcgcacacagtacattttgttctttaacttcctcttttcttgtctaactggaagtccccaaat

SEQ ID NO: 21894 - DNA, 122 bp, Homo sapiens
  misc_feature (61)..(62): /note="This region represents a CpG dinucleotide"
  misc_feature (61)..(61): /note="Nucleotide may be methylated to form 5-methylcytosine"
caacgttacacagttcaggaagtcaacagtcaaacactcacctgtctgacttcaaagctacgctgactctagttacctatccttgggtacttcccttctggaaggaagcaggagatgagtga

SEQ ID NO: 21895 - DNA, 122 bp, Homo sapiens
  misc_feature (61)..(62): /note="This region represents a CpG dinucleotide"
  misc_feature (61)..(61): /note="Nucleotide may be methylated to form 5-methylcytosine"
gccccatgagtccagcatcagagcctggtctctccatctaagaaggctgccatgagatagcggtcaggacagcaatggcaggtagcccagcatcaaggacagatgagtcaaacctcttctgt

SEQ ID NO: 21896 - DNA, 122 bp, Homo sapiens
  misc_feature (61)..(62): /note="This region represents a CpG dinucleotide"
  misc_feature (61)..(61): /note="Nucleotide may be methylated to form 5-methylcytosine"
cttaggtgattcgcccgccttgccctaccaaagtgctgggattacaggcgtgagccactgcgcccagcctgctaatccgtgttctaatccgggatacagagggacattcatggttctggggc

SEQ ID NO: 21897 - DNA, 122 bp, Homo sapiens
  misc_feature (61)..(62): /note="This region represents a CpG dinucleotide"
  misc_feature (61)..(61): /note="Nucleotide may be methylated to form 5-methylcytosine"
ggattaacagaggcttttacaactctgcttaccctctttttcttgattctagggctggtacgagccaagcccattattctaggtcctaatctgtttggtggagttgttactccacttctctg

SEQ ID NO: 21898 - DNA, 122 bp, Homo sapiens
  misc_feature (61)..(62): /note="This region represents a CpG dinucleotide"
  misc_feature (61)..(61): /note="Nucleotide may be methylated to form 5-methylcytosine"
tgcctctccaccctattttttgtcttggttgtaagtagacagcagacatattttctttcccgaaggtatcaatcccatgcacagtgcaaagcctaagctgtaaaggccacctgctaatggca

SEQ ID NO: 21899 - DNA, 122 bp, Homo sapiens
  misc_feature (61)..(62): /note="This region represents a CpG dinucleotide"
  misc_feature (61)..(61): /note="Nucleotide may be methylated to form 5-methylcytosine"
ttcttttttaggagctggtaggatttaacagaatattatcacttctctaaatgcatggaacggggagacttatctgagagtcaggttaatgagaactgattccatctatgaaacccctgcca

SEQ ID NO: 21900 - DNA, 122 bp, Homo sapiens
  misc_feature (61)..(62): /note="This region represents a CpG dinucleotide"
  misc_feature (61)..(61): /note="Nucleotide may be methylated to form 5-methylcytosine"
aggccaagccaggaaggtttagcttccctgggctctaagtggcagttttatcttgtggaacgtaaatgtctcctgtcactggagacaagtttggaaactcttcctctctctctccctccccc

SEQ ID NO: 21901 - DNA, 122 bp, Homo sapiens
  misc_feature (61)..(62): /note="This region represents a CpG dinucleotide"
  misc_feature (61)..(61): /note="Nucleotide may be methylated to form 5-methylcytosine"
ccttcacactggtaaatagtgcccctgagaagcaacacccggatgaatggtgctgtaaaacgtggggtgtggttacaagtcactaagtggttataacttatgaattctgaaaacttgttttt

SEQ ID NO: 21902 - DNA, 122 bp, Homo sapiens
  misc_feature (61)..(62): /note="This region represents a CpG dinucleotide"
  misc_feature (61)..(61): /note="Nucleotide may be methylated to form 5-methylcytosine"
cattgtgctttatgtatcttttctttcgttaccttcccctcctgctttgactgtagctgtcggggtgcctcgctcatcttagcatccccatggcatctgacttgatgcctcatgcatagctt

SEQ ID NO: 21903 - DNA, 122 bp, Homo sapiens
  misc_feature (61)..(62): /note="This region represents a CpG dinucleotide"
  misc_feature (61)..(61): /note="Nucleotide may be methylated to form 5-methylcytosine"
ttgctcagcattttacatatgtgatctcgttcctgacaactctggatctcagaatggtaccgttttaaagaggagaaagctgaggcatagagttagatgtattttccagagtcatacaaagt

SEQ ID NO: 21904 - DNA, 122 bp, Homo sapiens
  misc_feature (61)..(62): /note="This region represents a CpG dinucleotide"
  misc_feature (61)..(61): /note="Nucleotide may be methylated to form 5-methylcytosine"
cagtgaataaaacagattccataaatgcaggactagggttatttcacttgtcttcctgctcgcactctgcatactggctgactcacccacctttcagctctcatcctcagagctgacttcca

SEQ ID NO: 21905 - DNA, 122 bp, Homo sapiens
  misc_feature (61)..(62): /note="This region represents a CpG dinucleotide"
  misc_feature (61)..(61): /note="Nucleotide may be methylated to form 5-methylcytosine"
agggccactctcagaaaactacacgctagttgtagtaattagctccaggcatgcccttcccgccccctgttattaaacagcatgatgtggcagatcaagcactaaactagcaggtagcaaat

SEQ ID NO: 21906 - DNA, 122 bp, Homo sapiens
  misc_feature (61)..(62): /note="This region represents a CpG dinucleotide"
  misc_feature (61)..(61): /note="Nucleotide may be methylated to form 5-methylcytosine"
cttttcaagtcatctggtggtcagggctatttgtaactctaatctcatattcataccagtcgtttctaaatccaatcccatatttacaccaacctgtcttacaaccttaatttggtttccca

SEQ ID NO: 21907 - DNA, 122 bp, Homo sapiens
  misc_feature (61)..(62): /note="This region represents a CpG dinucleotide"
  misc_feature (61)..(61): /note="Nucleotide may be methylated to form 5-methylcytosine"
acttatcctgacaatccaactcaagtgttctttgctctgtgaggctttcctcattctccacgttgattgaggaactcccttctctttgcttccaaggactttgtacacaacctgatgacagt

SEQ ID NO: 21908 - DNA, 122 bp, Homo sapiens
  misc_feature (61)..(62): /note="This region represents a CpG dinucleotide"
  misc_feature (61)..(61): /note="Nucleotide may be methylated to form 5-methylcytosine"
acggggtgtggggaggtgggggaggaacgtgtacttcccccagtttcccagggattctgacgccccagataaaacttgagagccacaggtgtaggagatatagaaaaatattgttttttgat

SEQ ID NO: 21909 - DNA, 122 bp, Homo sapiens
  misc_feature (61)..(62): /note="This region represents a CpG dinucleotide"
  misc_feature (61)..(61): /note="Nucleotide may be methylated to form 5-methylcytosine"
ctgagttagcaaccatcagagttcatggctaagaatccatggtaccatgtcttgctgtcacgctgcacacagggctaagccaaggcgatactactattcgctgttcaactctccatttatac

SEQ ID NO: 21910 - DNA, 122 bp, Homo sapiens
  misc_feature (61)..(62): /note="This region represents a CpG dinucleotide"
  misc_feature (61)..(61): /note="Nucleotide may be methylated to form 5-methylcytosine"
tgtcaaattgcccaatttacactcctgccactccaaatgggggcatgcctcacacccctgcgtggtccagtacacaatgaatgctcattttgtgaagtcacagggtcaaatctttctccgtg

SEQ ID NO: 21911 - DNA, 122 bp, Homo sapiens
  misc_feature (61)..(62): /note="This region represents a CpG dinucleotide"
  misc_feature (61)..(61): /note="Nucleotide may be methylated to form 5-methylcytosine"
gaggcaggaatcgtactctgcgaatgaacaagaccagatgcccagtggagaccagaatttcgcattcctctgagccttggttgtaatttctctgtctaggttggctgtaatctgagcataaa

SEQ ID NO: 21912 - DNA, 122 bp, Homo sapiens
  misc_feature (61)..(62): /note="This region represents a CpG dinucleotide"
  misc_feature (61)..(61): /note="Nucleotide may be methylated to form 5-methylcytosine"
tacaatctatattatctcatatatagatttcttcctcactttatttgctcacttctgtcacgcatttaaaatgtcacagagaccaaaatagagtggctttctggtggaactcatggcagtca

SEQ ID NO: 21913 - DNA, 122 bp, Homo sapiens
  misc_feature (61)..(62): /note="This region represents a CpG dinucleotide"
  misc_feature (61)..(61): /note="Nucleotide may be methylated to form 5-methylcytosine"
agctctctccttaggcttttattttccaaaaccaaggatggcatccagtatgatggcccccgctgctgcctctgcccagggtgctgactttctccaaactctcaagcaggggttaagtatta

SEQ ID NO: 21914 - DNA, 122 bp, Homo sapiens
  misc_feature (61)..(62): /note="This region represents a CpG dinucleotide"
  misc_feature (61)..(61): /note="Nucleotide may be methylated to form 5-methylcytosine"
aggccccacgtgagtgtgagcgaggccccagcccacccctgtggccccaagaaggctctgcgacaaaatatccatgagtgccgcccacgaaggcattaaaaccaacgaccttctcaaaactt

SEQ ID NO: 21915 - DNA, 122 bp, Homo sapiens
  misc_feature (61)..(62): /note="This region represents a CpG dinucleotide"
  misc_feature (61)..(61): /note="Nucleotide may be methylated to form 5-methylcytosine"
tcctggaacactgaacaaacacccaaagcagggggtgggggaaagaaagcactcaacagccggctgacaacctgattagaaaacctaagggcggggaaggaaaagccagtcccacctttgag

SEQ ID NO: 21916 - DNA, 122 bp, Homo sapiens
  misc_feature (61)..(62): /note="This region represents a CpG dinucleotide"
  misc_feature (61)..(61): /note="Nucleotide may be methylated to form 5-methylcytosine"
aacgacttcttcatctcccgctggagctcctcataagtgccctgtgcctctgccaggtaacgctcccagttctggttgacaggcaggtaggagacacccatctccagcatgccggccagagt

SEQ ID NO: 21917 - DNA, 122 bp, Homo sapiens
  misc_feature (61)..(62): /note="This region represents a CpG dinucleotide"
  misc_feature (61)..(61): /note="Nucleotide may be methylated to form 5-methylcytosine"
aaagaaggtgttgacttgtgaaagaaccagttcctcatctcttatagtgtttaaaaagaacgccataatagaactccataatcctagagactcctttaactggtcacaccagctaacctcca

SEQ ID NO: 21918 - DNA, 122 bp, Homo sapiens
  misc_feature (61)..(62): /note="This region represents a CpG dinucleotide"
  misc_feature (61)..(61): /note="Nucleotide may be methylated to form 5-methylcytosine"
caggtaactctagagttaataacctcagtgaaacaaggatctcaaacatctgttggcagccgggtgtggctgagaagtgcaaatgtactccctctttgaatttggttttagagagccagcat

SEQ ID NO: 21919 - DNA, 122 bp, Homo sapiens
  misc_feature (61)..(62): /note="This region represents a CpG dinucleotide"
  misc_feature (61)..(61): /note="Nucleotide may be methylated to form 5-methylcytosine"
acacttcaaactaagtctgtggaatgacacatgcatcacccattggcagaagacacagcacgtactattacaaagctgatgtttagtctcaagcaaaaataaactgtaattcagtcaaaact

SEQ ID NO: 21920 - DNA, 122 bp, Homo sapiens
  misc_feature (61)..(62): /note="This region represents a CpG dinucleotide"
  misc_feature (61)..(61): /note="Nucleotide may be methylated to form 5-methylcytosine"
ccaacagtcacacaagttgaacgaattcggcaaccacctcattactattcattgcccatgcggatattcaaacgcagcacacagctctatcgcggctccactccacgaaaagtcccaagtat

SEQ ID NO: 21921 - DNA, 122 bp, Homo sapiens
  misc_feature (61)..(62): /note="This region represents a CpG dinucleotide"
  misc_feature (61)..(61): /note="Nucleotide may be methylated to form 5-methylcytosine"
agcaggagcttaatcagtgtttgttgaactctagatctgtggtcacgaacaagtcatggacgctgcaaaggctcctgccctttcaagagcagctgagatgaggccagccaagccctgggtgg

SEQ ID NO: 21922 - DNA, 122 bp, Homo sapiens
  misc_feature (61)..(62): /note="This region represents a CpG dinucleotide"
  misc_feature (61)..(61): /note="Nucleotide may be methylated to form 5-methylcytosine"
ccagtccagctagagggataggcactgtttccagccctgtgtaagtaccaggcactgttccgtctaatcctttaaaatgatattttctctaaccttgggtagtttcctcaaacacatgtgct

SEQ ID NO: 21923 - DNA, 122 bp, Homo sapiens
  misc_feature (61)..(62): /note="This region represents a CpG dinucleotide"
  misc_feature (61)..(61): /note="Nucleotide may be methylated to form 5-methylcytosine"
tataagaggttgctgacctaatgccagctgactcagtgactgaatctgtgatgttctcaacgtcaccatggggccagggctctgacccactaacacagacctgattctgatctgggaactcc

SEQ ID NO: 21924 - DNA, 122 bp, Homo sapiens
  misc_feature (61)..(62): /note="This region represents a CpG dinucleotide"
  misc_feature (61)..(61): /note="Nucleotide may be methylated to form 5-methylcytosine"
tgtgtacctagtggctcaggttcccctaccctgcttggcaataattaactgtagccaaagcgtctgccctattcagacagaagcctgtgtgtgctctagttcccaacagtttccttttaata

SEQ ID NO: 21925 - DNA, 122 bp, Homo sapiens
  misc_feature (61)..(62): /note="This region represents a CpG dinucleotide"
  misc_feature (61)..(61): /note="Nucleotide may be methylated to form 5-methylcytosine"
ttttctaaactggtacatttccccaggtacaaatctgcctcctgtggtagatgcagtgtgcgttaccacatctactgagtgcctgccaggacctggctctgccgtcatccacgtttcttgcc

SEQ ID NO: 21926 - DNA, 122 bp, Homo sapiens
  misc_feature (61)..(62): /note="This region represents a CpG dinucleotide"
  misc_feature (61)..(61): /note="Nucleotide may be methylated to form 5-methylcytosine"
gcatattagaaacacaaagcaaataatagccatgatcatatctcttttccatatcagaagcgtgaaaactgttcatggaaacaattgcctaatgttggaacggcgggcttgacttgaccaga

SEQ ID NO: 21927 - DNA, 122 bp, Homo sapiens
  misc_feature (61)..(62): /note="This region represents a CpG dinucleotide"
  misc_feature (61)..(61): /note="Nucleotide may be methylated to form 5-methylcytosine"
gggacttgaggtgacgcatttcacctctctgtgcctcagttctctgagttggtggagctgcgtcaaactcactcctaacccagaatactgagtggactggtgaactacactctcagctgcag

SEQ ID NO: 21928 - DNA, 122 bp, Homo sapiens
  misc_feature (61)..(62): /note="This region represents a CpG dinucleotide"
  misc_feature (61)..(61): /note="Nucleotide may be methylated to form 5-methylcytosine"
aaaagtgcatttcaatatcatgctctgaatgagacattgctctcaggatgcagaatccctcgtttctttctcccctgtgtgctctgcatgaggccacctgagaagatctggactcatgcaga

SEQ ID NO: 21929 - DNA, 122 bp, Homo sapiens
  misc_feature (61)..(62): /note="This region represents a CpG dinucleotide"
  misc_feature (61)..(61): /note="Nucleotide may be methylated to form 5-methylcytosine"
tccccagcccccagggcccctactcaccgtgggtcatcgctgtactgcactgtggcaaagcgcacaccctgtgcactggctgctccagagaaaggcagcaccagcccttcgagaaagctgcg

SEQ ID NO: 21930 - DNA, 122 bp, Homo sapiens
  misc_feature (61)..(62): /note="This region represents a CpG dinucleotide"
  misc_feature (61)..(61): /note="Nucleotide may be methylated to form 5-methylcytosine"
gagcagtgaggatgaccagagatcactttcatcaccatcttggatttggtgtgttttggccggcttgtttagcgcatcctgtttatcagcagggtatttatgacctgtatcttatgatacca

SEQ ID NO: 21931 - DNA, 122 bp, Homo sapiens
  misc_feature (61)..(62): /note="This region represents a CpG dinucleotide"
  misc_feature (61)..(61): /note="Nucleotide may be methylated to form 5-methylcytosine"
cagggaagaaggaactcattacctcttaaagtggcctatctcattttctgactattggaacgctgatcttcctgtaacaagcgaatttttttttccttatagttctggctcactgtctgagg

SEQ ID NO: 21932 - DNA, 122 bp, Homo sapiens
  misc_feature (61)..(62): /note="This region represents a CpG dinucleotide"
  misc_feature (61)..(61): /note="Nucleotide may be methylated to form 5-methylcytosine"
tgttgtcacttcccagatcactttcactttatgctcttctaaaattaaaacaaagatcatcgaccacaaaacacaattgttcttttgtagctcatgctagaataccctctttgttacatctc

SEQ ID NO: 21933 - DNA, 122 bp, Homo sapiens
  misc_feature (61)..(62): /note="This region represents a CpG dinucleotide"
  misc_feature (61)..(61): /note="Nucleotide may be methylated to form 5-methylcytosine"
agaaccaggggcggcggctgtgatgaggtcagagatcatcataagatttgtgaaccacatcgtcaaggccccgtggacgacagcaaaaataacaggtcacagggaatgacgtgacctgattc

SEQ ID NO: 21934 - DNA, 122 bp, Homo sapiens
  misc_feature (61)..(62): /note="This region represents a CpG dinucleotide"
  misc_feature (61)..(61): /note="Nucleotide may be methylated to form 5-methylcytosine"
ggtctcttaggagagctggtgacactctccaggtgagtccttgtgtaattattaaggactcgcctttctcaagctggcggggaaaggggttgctgagaagggagaaatctggagcctaagtg

SEQ ID NO: 21935 - DNA, 122 bp, Homo sapiens
  misc_feature (61)..(62): /note="This region represents a CpG dinucleotide"
  misc_feature (61)..(61): /note="Nucleotide may be methylated to form 5-methylcytosine"
ctcccatgcaggatccggggatggccccagctgggccctcctgacattggagcaggggcccggctcacctggatttggggtgcggggcggctgaggctcacgcccagagccttctttagcag

SEQ ID NO: 21936 - DNA, 122 bp, Homo sapiens
  misc_feature (61)..(62): /note="This region represents a CpG dinucleotide"
  misc_feature (61)..(61): /note="Nucleotide may be methylated to form 5-methylcytosine"
taccaggcagctttctgcttgatttggtatctttatagctgattgcctctattgcaaaagcgtaatttgaagcctcagccaggccctggttgctgcaagatgattacttgactcaatctaga

SEQ ID NO: 21937 - DNA, 122 bp, Homo sapiens
  misc_feature (61)..(62): /note="This region represents a CpG dinucleotide"
  misc_feature (61)..(61): /note="Nucleotide may be methylated to form 5-methylcytosine"
tgggaatgtgctgggtctcacctgaagccagcatgtctgagtctcagccaaggcccatggcgtactacgtggttatcactgctagttattcagggcccaagggccctttagtcagcacagga

SEQ ID NO: 21938 - DNA, 122 bp, Homo sapiens
  misc_feature (61)..(62): /note="This region represents a CpG dinucleotide"
  misc_feature (61)..(61): /note="Nucleotide may be methylated to form 5-methylcytosine"
gactaaagatatctactgtgttgaagtgggcaactagctttatttatttacattggggaacgtcagattaaacataaaggcaatgcgtatattatacagagaaagagaaaataaaacaacta

SEQ ID NO: 21939 - DNA, 122 bp, Homo sapiens
  misc_feature (61)..(62): /note="This region represents a CpG dinucleotide"
  misc_feature (61)..(61): /note="Nucleotide may be methylated to form 5-methylcytosine"
gctgtcaggtgaggtttccccaggggaccctccagagggctgtttatgtgcaaatctacacgtccctttctctactggggaagaacagagataaggagcggacgtgctcaaagggtgagtca

SEQ ID NO: 21940 - DNA, 122 bp, Homo sapiens
  misc_feature (61)..(62): /note="This region represents a CpG dinucleotide"
  misc_feature (61)..(61): /note="Nucleotide may be methylated to form 5-methylcytosine"
accgcctcccaggggctgtctgatcaccctgacctgccttccgcaagaattctgtgaggtcggtttagccagaatccctctgacccctgatgtctcctcttagtcattttccatccactgac

SEQ ID NO: 21941 - DNA, 122 bp, Homo sapiens
  misc_feature (61)..(62): /note="This region represents a CpG dinucleotide"
  misc_feature (61)..(61): /note="Nucleotide may be methylated to form 5-methylcytosine"
ggcccacaggctgggaaactcctccttgaagctgggaagcagagggttgggtctcacaggcgaagctcacaggcaaaaaggaacattgagggcggagctgtgaacccttccaaagctctccc

SEQ ID NO: 21942 - DNA, 122 bp, Homo sapiens
  misc_feature (61)..(62): /note="This region represents a CpG dinucleotide"
  misc_feature (61)..(61): /note="Nucleotide may be methylated to form 5-methylcytosine"
agtttgccaatgcagcacagagctctcttagctttaatcttgcctttcatagagcaaaatcgaacttttcccccctaagagacagcacagactgttcaagaagaggtaaatattaggaagac

SEQ ID NO: 21943 - DNA, 122 bp, Homo sapiens
  misc_feature (61)..(62): /note="This region represents a CpG dinucleotide"
  misc_feature (61)..(61): /note="Nucleotide may be methylated to form 5-methylcytosine"
ctgactcccttacaattactgaaaactgaaacaagattttttattatcgttttcccccaacgaattgtccagccatctgtttgtctgtgtaccaggcaagctgggttgatactaagtaaaac

SEQ ID NO: 21944 - DNA, 122 bp, Homo sapiens
  misc_feature (61)..(62): /note="This region represents a CpG dinucleotide"
  misc_feature (61)..(61): /note="Nucleotide may be methylated to form 5-methylcytosine"
accattttaatgaaaatgactaactggttatttccctgcaaatacagcaatgctctttatcgccccatcaactcctgccaccctgtaagtacaatggcaataacactagtcttggagttgga

SEQ ID NO: 21945 - DNA, 122 bp, Homo sapiens
  misc_feature (61)..(62): /note="This region represents a CpG dinucleotide"
  misc_feature (61)..(61): /note="Nucleotide may be methylated to form 5-methylcytosine"
aaatccctcagcagatgtgtcttcatgaatcattggtcacactgagtcacatgcctcttccgtgaggtaacatcaaggaaatggaatgtccacaactggcttaatcagagtagctgggaagg

SEQ ID NO: 21946 - DNA, 122 bp, Homo sapiens
  misc_feature (61)..(62): /note="This region represents a CpG dinucleotide"
  misc_feature (61)..(61): /note="Nucleotide may be methylated to form 5-methylcytosine"
ctctctccaccctggcacccagagcaaggatgttgctcattagtgactaagtaggaccagcgtctcaggtggcaatctgggagcaagctcagcttcacaatgggggactgtgggttggttgc

SEQ ID NO: 21947 - DNA, 122 bp, Homo sapiens
  misc_feature (61)..(62): /note="This region represents a CpG dinucleotide"
  misc_feature (61)..(61): /note="Nucleotide may be methylated to form 5-methylcytosine"
cttcagctattccatggtgtatttatcatctcctcacataacagattaggaacttgagctcggaggaacttccggagtttggctccaggctccttcactcactccccgaatgaccttgagta

SEQ ID NO: 21948 - DNA, 122 bp, Homo sapiens
  misc_feature (61)..(62): /note="This region represents a CpG dinucleotide"
  misc_feature (61)..(61): /note="Nucleotide may be methylated to form 5-methylcytosine"
actgtttggataagagattttgtgattgatggggaagcgagcagatttgcagtgatggagcgatggggaaaaggtggtcctgtgcagaatccacctcacctggggcacccccagaactggtc

SEQ ID NO: 21949 - DNA, 122 bp, Homo sapiens
  misc_feature (61)..(62): /note="This region represents a CpG dinucleotide"
  misc_feature (61)..(61): /note="Nucleotide may be methylated to form 5-methylcytosine"
tttgtatgaggctagtcagttataattttgctatttcctaagtagttcctcattttccatcggtttctaatgtctacgtctacatctgggtctattattgggctctagtcttttccattaat

SEQ ID NO: 21950 - DNA, 122 bp, Homo sapiens
  misc_feature (61)..(62): /note="This region represents a CpG dinucleotide"
  misc_feature (61)..(61): /note="Nucleotide may be methylated to form 5-methylcytosine"
gtaaataatatactattagcttaaacccatcccagctgtcaagagcctgagtagaggttacgaagataagaaatgaaagtattctagactctaggggtacatttgtcaggcatgcatatatc

SEQ ID NO: 21951 - DNA, 122 bp, Homo sapiens
  misc_feature (61)..(62): /note="This region represents a CpG dinucleotide"
  misc_feature (61)..(61): /note="Nucleotide may be methylated to form 5-methylcytosine"
cacatctagagtgcccctccagcaacaggcttcagctctgaggagcacacacagtgactacgaaaccctgcggaacacgcatctgggtagcagcagctctaatgactgttgggctcctctcc

SEQ ID NO: 21952 - DNA, 122 bp, Homo sapiens
  misc_feature (61)..(62): /note="This region represents a CpG dinucleotide"
  misc_feature (61)..(61): /note="Nucleotide may be methylated to form 5-methylcytosine"
tggaaaagaattcaagtcaccaaatcttaagcatttatttagtgtttgtgctgtgtcaagcgtagttctgggggctaagtatacaaaagtaaataagacttagattctgccctaaggaactc

SEQ ID NO: 21953 - DNA, 122 bp, Homo sapiens
  misc_feature (61)..(62): /note="This region represents a CpG dinucleotide"
  misc_feature (61)..(61): /note="Nucleotide may be methylated to form 5-methylcytosine"
cttggaatatacttgtttcaggcagagttttgcaagggacctgagccattattttgcaaacgcctggaagagcacatgaaactcagagaactacaatgcagacgacaacgcctagaaggaat

SEQ ID NO: 21954 - DNA, 122 bp, Homo sapiens
  misc_feature (61)..(62): /note="This region represents a CpG dinucleotide"
  misc_feature (61)..(61): /note="Nucleotide may be methylated to form 5-methylcytosine"
tgctacgggggagagtgagtgctcctcctgtaatatttaatcagcaacctgggaggacagcgtcatctttacagacagctgctgctcacttagaggcagatgaatgagtgttcttagaagct

SEQ ID NO: 21955 - DNA, 122 bp, Homo sapiens
  misc_feature (61)..(62): /note="This region represents a CpG dinucleotide"
  misc_feature (61)..(61): /note="Nucleotide may be methylated to form 5-methylcytosine"
aatcttactcctcactcaagaacttcctgctggcatatatgatgacttagcttttttccccgacagatcgactatgttgatctaacttttctaagccagtttctgtctgatatgccagcttg

SEQ ID NO: 21956 - DNA, 122 bp, Homo sapiens
  misc_feature (61)..(62): /note="This region represents a CpG dinucleotide"
  misc_feature (61)..(61): /note="Nucleotide may be methylated to form 5-methylcytosine"
tcacaacaaacatttctttctatcataatcagataaggaaaggagttccagaaaattaagcgacttgcccaagatcacacacctagaaagcccagggtggcaggcaaattgcagattggagt

SEQ ID NO: 21957 - DNA, 122 bp, Homo sapiens
  misc_feature (61)..(62): /note="This region represents a CpG dinucleotide"
  misc_feature (61)..(61): /note="Nucleotide may be methylated to form 5-methylcytosine"
gcatctgctttgcctggtgatgatgattaatagacaggcccaggtgcctggtgcccaaggcgcctaatttagtgtcgatcctgcaggggcagagcatcaagaatgacacaggcctggtaatg

SEQ ID NO: 21958 - DNA, 122 bp, Homo sapiens
  misc_feature (61)..(62): /note="This region represents a CpG dinucleotide"
  misc_feature (61)..(61): /note="Nucleotide may be methylated to form 5-methylcytosine"
ggttgtcatagacatatctgctgttgcatctctgtgtctcaatgagaagcaccttggcagcgttcagcacttctgaggtcttccctaaggacagggagacttgttgagctcccagtgttgcc

SEQ ID NO: 21959 - DNA, 122 bp, Homo sapiens
  misc_feature (61)..(62): /note="This region represents a CpG dinucleotide"
  misc_feature (61)..(61): /note="Nucleotide may be methylated to form 5-methylcytosine"
agaaggaggggaagaatgacagaaactcagtgaaggccttcagaaccgtttgccaagaaacgttttggagaggttaatgatacttgaacactaatgctcttcagttgcttttaccttgaaga

SEQ ID NO: 21960 - DNA, 122 bp, Homo sapiens
  misc_feature (61)..(62): /note="This region represents a CpG dinucleotide"
  misc_feature (61)..(61): /note="Nucleotide may be methylated to form 5-methylcytosine"
catcctcagcctcccgttcaacttgtttattctcccagaaacctccttataacatacttccgtttccccagttttccttatgcttgaaaagtagatccaagataacagtcctagaaacacac

SEQ ID NO: 21961 - DNA, 122 bp, Homo sapiens
  misc_feature (61)..(62): /note="This region represents a CpG dinucleotide"
  misc_feature (61)..(61): /note="Nucleotide may be methylated to form 5-methylcytosine"
cctactgacacagggctagggccattcaggaagcagtcatttcagggataggcccactgccgcgcctgcctgctcatgtccacaagcagctgcccagctgatcaatcaccacaatttggggt

SEQ ID NO: 21962 - DNA, 122 bp, Homo sapiens
  misc_feature (61)..(62): /note="This region represents a CpG dinucleotide"
  misc_feature (61)..(61): /note="Nucleotide may be methylated to form 5-methylcytosine"
accagcctggccaacatggtgaaacctcgtctctactaaaaatacaaaaaattagctgggcgtggtggtgatcacctgtaatctcaggaggctgaggcacgaaaatcacttgaagctgggag

SEQ ID NO: 21963 - DNA, 122 bp, Homo sapiens
  misc_feature (61)..(62): /note="This region represents a CpG dinucleotide"
  misc_feature (61)..(61): /note="Nucleotide may be methylated to form 5-methylcytosine"
tgcttctgtcttagctcctcagtagctgagaccatgggcacccaccactgtgcccagattcgggctttcttgtaaaaagcggatggatgcttgaaactattttctgaatccctttggctccc

SEQ ID NO: 21964 - DNA, 122 bp, Homo sapiens
  misc_feature (61)..(62): /note="This region represents a CpG dinucleotide"
  misc_feature (61)..(61): /note="Nucleotide may be methylated to form 5-methylcytosine"
tttaatttaaccctgacttaaaagggtgttcagggagcatcatgctagaaatcccaaatacgatgaaagaatcccacaacagaggtgaacagaggcctgttcccaggttcatcccgggaagg

SEQ ID NO: 21965 - DNA, 122 bp, Homo sapiens
  misc_feature (61)..(62): /note="This region represents a CpG dinucleotide"
  misc_feature (61)..(61): /note="Nucleotide may be methylated to form 5-methylcytosine"
cactttccgttttcttaccatgtgcagtaatgatggataaaaacaatactgttgataatacgttgcagcaacactgcattctaatgggttaggtactctgttttataggtaagagctatgtg

SEQ ID NO: 21966 - DNA, 122 bp, Homo sapiens
  misc_feature (61)..(62): /note="This region represents a CpG dinucleotide"
  misc_feature (61)..(61): /note="Nucleotide may be methylated to form 5-methylcytosine"
tttcgagaactcgcagcacctggattatatcaccgagaagctctggcgcaacgcgttgctcgctggggcggtgccggtggtgctgggcccagaccgtgccaactacgagcgctttgtgcccc

SEQ ID NO: 21967 - DNA, 122 bp, Homo sapiens
  misc_feature (61)..(62): /note="This region represents a CpG dinucleotide"
  misc_feature (61)..(61): /note="Nucleotide may be methylated to form 5-methylcytosine"
aagactctctgatagtgtggacaagaacctggtaactgtggttgtttctgggaaaggaatcgtagatagcaccagatttatttatttgcaaagaagtaaagccaataaagtttaccggatga

SEQ ID NO: 21968 - DNA, 122 bp, Homo sapiens
  misc_feature (61)..(62): /note="This region represents a CpG dinucleotide"
  misc_feature (61)..(61): /note="Nucleotide may be methylated to form 5-methylcytosine"
cttgccttggccaggccttcccctcccactctgagcccccttccctccccgggcatgcagcgcaaagccaaggagctggctcaagagtaaagagtgggcacctcatccttgctctctggggc

SEQ ID NO: 21969 - DNA, 122 bp, Homo sapiens
  misc_feature (61)..(62): /note="This region represents a CpG dinucleotide"
  misc_feature (61)..(61): /note="Nucleotide may be methylated to form 5-methylcytosine"
gcctcaagggacaagtctggagtgtgtgttctaagccagcattcctccaactttcatggacgcatgaatcatcggagtgctttacgaaagtgcagattctgattcagcagttgtggggcgag

SEQ ID NO: 21970 - DNA, 122 bp, Homo sapiens
  misc_feature (61)..(62): /note="This region represents a CpG dinucleotide"
  misc_feature (61)..(61): /note="Nucleotide may be methylated to form 5-methylcytosine"
cacattcacttgtgcacggcattcttttgctcacaaattagtcacagggccagccagatacgagaggagaggactacagaagagttcaatcactggaaggcatgaatcactggagagttgtc

SEQ ID NO: 21971 - DNA, 122 bp, Homo sapiens
  misc_feature (61)..(62): /note="This region represents a CpG dinucleotide"
  misc_feature (61)..(61): /note="Nucleotide may be methylated to form 5-methylcytosine"
aactgcaaaattatcgctgtttatgataaggctttggcacaaaacaagcggcatacccagcgtgaataaataaaatatatacaggctgggtgcagtggctcacgcctgtaatcccagcactt

SEQ ID NO: 21972 - DNA, 122 bp, Homo sapiens
  misc_feature (61)..(62): /note="This region represents a CpG dinucleotide"
  misc_feature (61)..(61): /note="Nucleotide may be methylated to form 5-methylcytosine"
gcagacaccatggagaagtgacacccacactctgatcacacctggaggaggcatccagcacgttggaagtgaagtagcacttacccaacaacataacctgggttgcctaaagttttacactt

SEQ ID NO: 21973 - DNA, 122 bp, Homo sapiens
  misc_feature (61)..(62): /note="This region represents a CpG dinucleotide"
  misc_feature (61)..(61): /note="Nucleotide may be methylated to form 5-methylcytosine"
ttcgagctgagtggcaaaaatactgctaaggtcaacgttctgaaggaggcaaaacccacacgcagaaccagccataggcctgtcaacaaggcgagatgttatcattgctcatgtgctgggtc

SEQ ID NO: 21974 - DNA, 122 bp, Homo sapiens
  misc_feature (61)..(62): /note="This region represents a CpG dinucleotide"
  misc_feature (61)..(61): /note="Nucleotide may be methylated to form 5-methylcytosine"
tattatgagaggttgaataggcttcatctctcagtggtgattaacatagttcttaagaaacgtgacagagctaggccaagcatcagtaaaggaacacactcttggagcttaattgaggaggg

SEQ ID NO: 21975 - DNA, 122 bp, Homo sapiens
  misc_feature (61)..(62): /note="This region represents a CpG dinucleotide"
  misc_feature (61)..(61): /note="Nucleotide may be methylated to form 5-methylcytosine"
tgcgaaactggtcttgacgtttgcttgacttgagggggccccacctggtgcccaagcccacgtaatgaactactaccaaccacaaatacttgaggcaagtccaggttccctatgactcaacc

SEQ ID NO: 21976 - DNA, 122 bp, Homo sapiens
  misc_feature (61)..(62): /note="This region represents a CpG dinucleotide"
  misc_feature (61)..(61): /note="Nucleotide may be methylated to form 5-methylcytosine"
ccctttgctcttgcgatttcccacccccaaccctgccccttgcattcctgctctcaggaacgtggagctcaagcaaacacatcagaagatgagaaaatctccaaggatggcagaccaactag

SEQ ID NO: 21977 - DNA, 122 bp, Homo sapiens
  misc_feature (61)..(62): /note="This region represents a CpG dinucleotide"
  misc_feature (61)..(61): /note="Nucleotide may be methylated to form 5-methylcytosine"
ctctggatgcttgcatttgacatacatgtgctcatcctgtgctcatcttacttgacctttcggcagcgttagataccactgtatactccctctattttgaaatactttcttcccttgccttt

SEQ ID NO: 21978 - DNA, 122 bp, Homo sapiens
  misc_feature (61)..(62): /note="This region represents a CpG dinucleotide"
  misc_feature (61)..(61): /note="Nucleotide may be methylated to form 5-methylcytosine"
tagcatatgttcattctataattcatctctgccctttagatgcagccagaatctgagatacgtacctgtatcactttcccagcactttcctttattggtttgtcttttacaatgactcagca

SEQ ID NO: 21979 - DNA, 122 bp, Homo sapiens
  misc_feature (61)..(62): /note="This region represents a CpG dinucleotide"
  misc_feature (61)..(61): /note="Nucleotide may be methylated to form 5-methylcytosine"
atcaagcagaaagcatctgctaattaagtgtattctatgcatggcctgtctgtattagtacgtaatttccatcttcataaaattcctttgtggtaaatagtaaatactaatctcattttata

SEQ ID NO: 21980 - DNA, 122 bp, Homo sapiens
  misc_feature (61)..(62): /note="This region represents a CpG dinucleotide"
  misc_feature (61)..(61): /note="Nucleotide may be methylated to form 5-methylcytosine"
cacataatgagacaaagcaactcatcacaggataagaataaaaatcaagtggactgatggcgttgagtgtcacatgaggcttagattttgggatcagcagcatcaacatcaccttcaagctt

SEQ ID NO: 21981 - DNA, 122 bp, Homo sapiens
  misc_feature (61)..(62): /note="This region represents a CpG dinucleotide"
  misc_feature (61)..(61): /note="Nucleotide may be methylated to form 5-methylcytosine"
actcatctatactgccgcagtggtcaagtgtagcacccttagcttgaatggcatatgcctcggctggcatttcatcacaatcaacattaagtggtagcttgagtcattgtgaggtcacttcc

SEQ ID NO: 21982 - DNA, 122 bp, Homo sapiens
  misc_feature (61)..(62): /note="This region represents a CpG dinucleotide"
  misc_feature (61)..(61): /note="Nucleotide may be methylated to form 5-methylcytosine"
gaacttaggccttaggattaagtagacttaggtttggttccaaactctaccacttgctaccgtgtcaccacttacagctctgtcattatcactagttgtccttcccaatgtcccttaactac

SEQ ID NO: 21983 - DNA, 122 bp, Homo sapiens
  misc_feature (61)..(62): /note="This region represents a CpG dinucleotide"
  misc_feature (61)..(61): /note="Nucleotide may be methylated to form 5-methylcytosine"
gcattgctgttttgataaacaataaatacttccctccttctcccataatctattcatgttcgttctatttgcattggtgtgcgaattagtctcttccccttcaaacaagtcagtttagctag

SEQ ID NO: 21984 - DNA, 122 bp, Homo sapiens
  misc_feature (61)..(62): /note="This region represents a CpG dinucleotide"
  misc_feature (61)..(61): /note="Nucleotide may be methylated to form 5-methylcytosine"
ctggtgaatcatcagggcctaggacaaacatcactcacttggtcatctgaaggccaggaacgattgtgtcattatgtatgtgcatttctcaactaagccttcaagagggtgatgggacgaga

SEQ ID NO: 21985 - DNA, 122 bp, Homo sapiens
  misc_feature (61)..(62): /note="This region represents a CpG dinucleotide"
  misc_feature (61)..(61): /note="Nucleotide may be methylated to form 5-methylcytosine"
cgataggtgacatttactgagcacttactatgagtcagcctctatcctaagggctttatccgtactctaatcctatgataatagtattgttttacagatgagaaagcagagtcttagaatag

SEQ ID NO: 21986 - DNA, 122 bp, Homo sapiens
  misc_feature (61)..(62): /note="This region represents a CpG dinucleotide"
  misc_feature (61)..(61): /note="Nucleotide may be methylated to form 5-methylcytosine"
tccagacctctcagagatgtttcattccttgggctgggttgaactgagacatagccctgccgcgagacaggagggagaaggagccagtggacagaatgttctcatgcctggatgcaccagcc

SEQ ID NO: 21987 - DNA, 122 bp, Homo sapiens
  misc_feature (61)..(62): /note="This region represents a CpG dinucleotide"
  misc_feature (61)..(61): /note="Nucleotide may be methylated to form 5-methylcytosine"
gggagaagcagacttgtggagctgaagagaaacacccagaagctcaggtgaaagctgacacggccatagttggttcatattaaccatgtgattaaaatggttaaatattaatttgggttctt

SEQ ID NO: 21988 - DNA, 122 bp, Homo sapiens
  misc_feature (61)..(62): /note="This region represents a CpG dinucleotide"
  misc_feature (61)..(61): /note="Nucleotide may be methylated to form 5-methylcytosine"
gggctctgattggaggctgaggcagctatgttgggaatgaggtacggggctgagtctccccgtctggatggaattagattgagagatgcctggactctgcactccagggctgccatgcagtc

SEQ ID NO: 21989 - DNA, 122 bp, Homo sapiens
  misc_feature (61)..(62): /note="This region represents a CpG dinucleotide"
  misc_feature (61)..(61): /note="Nucleotide may be methylated to form 5-methylcytosine"
gagggctgaaccagccaaagcctttaagaacctggcactccagggttggtacagagcaggcgctcaacagccgccacttatcaatggtagtgacttgctaataaactcatccctgctgatct

SEQ ID NO: 21990 - DNA, 122 bp, Homo sapiens
  misc_feature (61)..(62): /note="This region represents a CpG dinucleotide"
  misc_feature (61)..(61): /note="Nucleotide may be methylated to form 5-methylcytosine"
gcagatattgaacaagtaagtacacatggggtaagtatcacaagagtggggaggctagatcggctgggggagaacacagtgccatgcaaggtctctgaaagagcacagccacaaaccacaga

SEQ ID NO: 21991 - DNA, 122 bp, Homo sapiens
  misc_feature (61)..(62): /note="This region represents a CpG dinucleotide"
  misc_feature (61)..(61): /note="Nucleotide may be methylated to form 5-methylcytosine"
ttccgaggcctggacttgctgcctctcaaggaatgctcaggaagggggtcacacagtcctcggtcaggacagatcacgtatcctttgctcctgagccaaagctatttatattttggcaggag

SEQ ID NO: 21992 - DNA, 122 bp, Homo sapiens
  misc_feature (61)..(62): /note="This region represents a CpG dinucleotide"
  misc_feature (61)..(61): /note="Nucleotide may be methylated to form 5-methylcytosine"
caacgattaaaaactaatactgagtgcttactctggtactgtgctgaaaactttaaatcccgtcaaactccctcaacaaccctatgattcaggtattattactatgttcattttgcagtggg

SEQ ID NO: 21993 - DNA, 122 bp, Homo sapiens
  misc_feature (61)..(62): /note="This region represents a CpG dinucleotide"
  misc_feature (61)..(61): /note="Nucleotide may be methylated to form 5-methylcytosine"
tatgttgggacctatggaatacttccaggaacagaatcatgtttctatgcttcctgggaacgctttctgacaggcaagcatggaagtttgacactgggtaactcagttattaaaagtctgtg

SEQ ID NO: 21994 - DNA, 122 bp, Homo sapiens
  misc_feature (61)..(62): /note="This region represents a CpG dinucleotide"
  misc_feature (61)..(61): /note="Nucleotide may be methylated to form 5-methylcytosine"
tatcttggtggtgatggggatttggagatgatatgttagaaaccgctagatgggtatttacggcagtgtggaaaaatgacagtcaaatggttcatgtcacaggcttatccagagtcaatctt

SEQ ID NO: 21995 - DNA, 122 bp, Homo sapiens
  misc_feature (61)..(62): /note="This region represents a CpG dinucleotide"
  misc_feature (61)..(61): /note="Nucleotide may be methylated to form 5-methylcytosine"
cctaaatgaacttgtcaaaccaacctggtgcagcagggcctgcaaaatgcagtgacgtcccggccttcatcagtcatgggccactcctcattctaaagtgcctcgtgagcaccctaacctct

SEQ ID NO: 21996 - DNA, 122 bp, Homo sapiens
  misc_feature (61)..(62): /note="This region represents a CpG dinucleotide"
  misc_feature (61)..(61): /note="Nucleotide may be methylated to form 5-methylcytosine"
ttctactcttggcttggatatcttttgttcatctttcaacacttaggccaagcagcttggcgaactttggatccatttgcatgatgtgtacttaatgcttggttgattcccttactagtgtg

SEQ ID NO: 21997 - DNA, 122 bp, Homo sapiens
  misc_feature (61)..(62): /note="This region represents a CpG dinucleotide"
  misc_feature (61)..(61): /note="Nucleotide may be methylated to form 5-methylcytosine"
ccattatcctgatctgtgctcatggaatccctgacactggatctggggtataacaagaaccgtggccaggaatggatgactttgcaagcatgtgtgtgtgcagaaggagacaggaaggggct

SEQ ID NO: 21998 - DNA, 122 bp, Homo sapiens
  misc_feature (61)..(62): /note="This region represents a CpG dinucleotide"
  misc_feature (61)..(61): /note="Nucleotide may be methylated to form 5-methylcytosine"
actgaagaaagaagaaaactcaaggtcatctgagccagtaaatatcacactacagatttccgagacaagtcagacctgaccccacattttgggaactagcttaagaacagggctgccatctt

SEQ ID NO: 21999 - DNA, 122 bp, Homo sapiens
  misc_feature (61)..(62): /note="This region represents a CpG dinucleotide"
  misc_feature (61)..(61): /note="Nucleotide may be methylated to form 5-methylcytosine"
cagatgtagccgaggcccctccccggggagcagcagacaccacagaccctcgggcgctcccgtcttcagcaagcgtgaacgcgccgctggaaagaatgctggctttctctccaagtgaacgt

SEQ ID NO: 22000 - DNA, 122 bp, Homo sapiens
  misc_feature (61)..(62): /note="This region represents a CpG dinucleotide"
  misc_feature (61)..(61): /note="Nucleotide may be methylated to form 5-methylcytosine"
attgagtgtacatgttttcctatgcaggttagagacttcagagtagctaataaggagccacgacatgggcctaagagaagagaagatagtactcaagtggagtttctgcttagggcagcaat

SEQ ID NO: 22001 - DNA, 122 bp, Homo sapiens
  misc_feature (61)..(62): /note="This region represents a CpG dinucleotide"
  misc_feature (61)..(61): /note="Nucleotide may be methylated to form 5-methylcytosine"
atttatttctcacagttctgaaagttggaaatccaggatccaggtgctagccaatctggtcgctggtgaggacccagagattcacagatgactcacagaaggcacctactcacagtgccctc

SEQ ID NO: 22002 - DNA, 122 bp, Homo sapiens
  misc_feature (61)..(62): /note="This region represents a CpG dinucleotide"
  misc_feature (61)..(61): /note="Nucleotide may be methylated to form 5-methylcytosine"
cctgaagccccagagggagacactcaagctccctctaggtaggaaagggtatctggctggcgttagctgagaggcttaactaaaggagggttcttgctccattgtctcccaaatttggaaat

SEQ ID NO: 22003 - DNA, 122 bp, Homo sapiens
  misc_feature (61)..(62): /note="This region represents a CpG dinucleotide"
  misc_feature (61)..(61): /note="Nucleotide may be methylated to form 5-methylcytosine"
aagccaagctcctcaccatgcctagcatgccctttgtgttctgggcctttgctctccttccgtcttatttcctgctgctcacatagcattgctgcagccatcatgaccctgtgggatcattg

SEQ ID NO: 22004 - DNA, 122 bp, Homo sapiens
  misc_feature (61)..(62): /note="This region represents a CpG dinucleotide"
  misc_feature (61)..(61): /note="Nucleotide may be methylated to form 5-methylcytosine"
tccagtgtttcctggggcatctcctcaagctggctggggttctctgcatctcagctgtggcgcctggtgtgagggcgcacgcttcgcagtgagagtgaaatgcccagttcgcgctggcagag

SEQ ID NO: 22005 - DNA, 122 bp, Homo sapiens
  misc_feature (61)..(62): /note="This region represents a CpG dinucleotide"
  misc_feature (61)..(61): /note="Nucleotide may be methylated to form 5-methylcytosine"
atacagtcactatctgcacctgtcctgccctgcaggcctggagcctcctgagggcaggtccggtacaggtttaacccatgccctgatgctcagtcagcccagaggctggcacagaacagtgc

SEQ ID NO: 22006 - DNA, 122 bp, Homo sapiens
  misc_feature (61)..(62): /note="This region represents a CpG dinucleotide"
  misc_feature (61)..(61): /note="Nucleotide may be methylated to form 5-methylcytosine"
attaagggttcaaggaagagtctcctttctattgccctggtttggagaatctgcagaagccgctaaagcttcagagaggggatgactcagagggacaagtgcccacaggcatatgcctgctg

SEQ ID NO: 22007 - DNA, 122 bp, Homo sapiens
  misc_feature (61)..(62): /note="This region represents a CpG dinucleotide"
  misc_feature (61)..(61): /note="Nucleotide may be methylated to form 5-methylcytosine"
ctaagcctcctgagcacaggaatagggtgttcctcggtcactgctaaagctccattgtctcgcttggaaagcacttagtccacagtttctaatgaatgaatgagtgagtgagggaataatct

SEQ ID NO: 22008 - DNA, 122 bp, Homo sapiens
  misc_feature (61)..(62): /note="This region represents a CpG dinucleotide"
  misc_feature (61)..(61): /note="Nucleotide may be methylated to form 5-methylcytosine"
aaaatgaggagaccacagaactacgaaccttaaccttgacagccacaactctgaggaaaccgacccagaacataacagactcacctggcttagacacgaacctctaggggataattgagagg

SEQ ID NO: 22009 - DNA, 122 bp, Homo sapiens
  misc_feature (61)..(62): /note="This region represents a CpG dinucleotide"
  misc_feature (61)..(61): /note="Nucleotide may be methylated to form 5-methylcytosine"
tgatccgtcttctcagagccattagcccccacgtccttgacggtggaacagttgtaaactcgagaccatccgtggggtggctgagactgacaattcattacgcagttggatggagaaggcgg

SEQ ID NO: 22010 - DNA, 122 bp, Homo sapiens
  misc_feature (61)..(62): /note="This region represents a CpG dinucleotide"
  misc_feature (61)..(61): /note="Nucleotide may be methylated to form 5-methylcytosine"
ttcatagcatggaagtcactggtgacctcagcaagggttattagagaggaatcatgaaggcggatctcggagtgagttggataagtaggtgaaaggaaatattggcaagtacagacgattat

SEQ ID NO: 22011 - DNA, 122 bp, Homo sapiens
  misc_feature (61)..(62): /note="This region represents a CpG dinucleotide"
  misc_feature (61)..(61): /note="Nucleotide may be methylated to form 5-methylcytosine"
accactgtagcccacatttctgctccatttgaactagccaatcgggattagcttagattgcgcagtccagccccagccaatgggaacaggacacagaagcagcgactaaccgcattagggat

SEQ ID NO: 22012 - DNA, 122 bp, Homo sapiens
  misc_feature (61)..(62): /note="This region represents a CpG dinucleotide"
  misc_feature (61)..(61): /note="Nucleotide may be methylated to form 5-methylcytosine"
gtctgggtagctccagctcctcccgggctactgtaacagtagcagcagcagccacgcgcgcgtgtgagcagctcagcaccaggcatgacgtaagcactttgtgtagtcattcatttaatcct

SEQ ID NO: 22013 - DNA, 122 bp, Homo sapiens
  misc_feature (61)..(62): /note="This region represents a CpG dinucleotide"
  misc_feature (61)..(61): /note="Nucleotide may be methylated to form 5-methylcytosine"
ccctcttgtgggcagattcccctgtgtaaggtgctggaggctgaggttccagcctgcagccgcttgtgatcctgatatgtcgagagttctggaagactgatgactgctgacccccttcttaa

SEQ ID NO: 22014 - DNA, 122 bp, Homo sapiens
  misc_feature (61)..(62): /note="This region represents a CpG dinucleotide"
  misc_feature (61)..(61): /note="Nucleotide may be methylated to form 5-methylcytosine"
cacccggccagtgaactctgaaagctcggtcagtaggtggaggaggaataacggcagcagcgggcaagggaacactcccagaaatcacgcaagaccttcgatgtgcacagtgtggctgcaaa

SEQ ID NO: 22015 - DNA, 122 bp, Homo sapiens
  misc_feature (61)..(62): /note="This region represents a CpG dinucleotide"
  misc_feature (61)..(61): /note="Nucleotide may be methylated to form 5-methylcytosine"
tgattcatttttataagattagactggctgttttgcaacaggtggatgagagtgaaacaacggcagaagtggttaaaatagctatgacagaattaagaaagactaggatggaggtcatggca

SEQ ID NO: 22016 - DNA, 122 bp, Homo sapiens
  misc_feature (61)..(62): /note="This region represents a CpG dinucleotide"
  misc_feature (61)..(61): /note="Nucleotide may be methylated to form 5-methylcytosine"
caggcatttattctggaagcctgaccaagcctgctgactgggctgggctgtagactgtagcgttcatcagtgattttctttggccagagtgagcaccactctaagcagagtctttcagaact

SEQ ID NO: 22017 - DNA, 122 bp, Homo sapiens
  misc_feature (61)..(62): /note="This region represents a CpG dinucleotide"
  misc_feature (61)..(61): /note="Nucleotide may be methylated to form 5-methylcytosine"
aagttcctgaacaatgtcaagctcattcccacctcagggcctttagcacttggttttcctcgtctgtctctcttcacacagctagttacttcttatctttcaagtgtcagctgagcatatct

SEQ ID NO: 22018 - DNA, 122 bp, Homo sapiens
  misc_feature (61)..(62): /note="This region represents a CpG dinucleotide"
  misc_feature (61)..(61): /note="Nucleotide may be methylated to form 5-methylcytosine"
tggggcctgtgcagcctgaacaagagcccaaaagtgaccttgggagcatctaagactagacgctcttagcagagcatgggtcccttttccttaccccttattccatagcctacaggttctct

SEQ ID NO: 22019 - DNA, 122 bp, Homo sapiens
  misc_feature (61)..(62): /note="This region represents a CpG dinucleotide"
  misc_feature (61)..(61): /note="Nucleotide may be methylated to form 5-methylcytosine"
ttatctgctgatatctccaaagcaagttatatggtcaagtccaaggtcaagaagcagggacgtacattccatataccatgaagccaaagcatgtcacacagtcaaactcaacatcaataggt

SEQ ID NO: 22020 - DNA, 122 bp, Homo sapiens
  misc_feature (61)..(62): /note="This region represents a CpG dinucleotide"
  misc_feature (61)..(61): /note="Nucleotide may be methylated to form 5-methylcytosine"
ttccactttttctagcctcctaaacactgacctatcagtactatcttggattctttatgtcgtggagtgtctgccacaatttttacttcctcaactgctaaacaacacctcatcctgcatcc

SEQ ID NO: 22021 - DNA, 122 bp, Homo sapiens
  misc_feature (61)..(62): /note="This region represents a CpG dinucleotide"
  misc_feature (61)..(61): /note="Nucleotide may be methylated to form 5-methylcytosine"
cccctccaccccctgggcccggccccccccccccccccccgtaaatctatgtatttaatgcgagctagtcttaactctgaggttgtagctcctggggcacccccagcctccaggcccctgac

SEQ ID NO: 22022 - DNA, 122 bp, Homo sapiens
  misc_feature (61)..(62): /note="This region represents a CpG dinucleotide"
  misc_feature (61)..(61): /note="Nucleotide may be methylated to form 5-methylcytosine"
gggggtggacttttcaatctgatagacctgaggcgaaatcagaaaccagtctctcttagccgtggaatgctggataagttacgtcacttttctgggccttcatttttgcagctgagaaagga

SEQ ID NO: 22023 - DNA, 122 bp, Homo sapiens
  misc_feature (61)..(62): /note="This region represents a CpG dinucleotide"
  misc_feature (61)..(61): /note="Nucleotide may be methylated to form 5-methylcytosine"
acagttacgaaatgcttgtggtttccagagtggggaagtttggaaatgtggataagggatcgcggacctacaaaaccatcaccttttggatgaggtaactgagattcaaagaggtgaagtaa

SEQ ID NO: 22024 - DNA, 122 bp, Homo sapiens
  misc_feature (61)..(62): /note="This region represents a CpG dinucleotide"
  misc_feature (61)..(61): /note="Nucleotide may be methylated to form 5-methylcytosine"
actgtggcaaccctgactcaggactgtgtcactacagtttctgtttctgcatcatatcaccgtcttctctcctatagtcacatttctttcctgcttctctctttaaggacactcttgattgc

SEQ ID NO: 22025 - DNA, 122 bp, Homo sapiens
  misc_feature (61)..(62): /note="This region represents a CpG dinucleotide"
  misc_feature (61)..(61): /note="Nucleotide may be methylated to form 5-methylcytosine"
caatgattaataaataatgctaacactcgatgctggtaaccagccaatgcttacatgaagcgtggataggccaggcaccattctcagcactgggcatattttaccactaactcctcttcatc

SEQ ID NO: 22026 - DNA, 122 bp, Homo sapiens
  misc_feature (61)..(62): /note="This region represents a CpG dinucleotide"
  misc_feature (61)..(61): /note="Nucleotide may be methylated to form 5-methylcytosine"
agctgggatttacctggcctcgtcactagactaatgggattgtggcacaggtgaacatcccgtcattggagaagaaaggctggattgaaggccaggtgggggaggggtgctaggctgtgggg

SEQ ID NO: 22027 - DNA, 122 bp, Homo sapiens
  misc_feature (61)..(62): /note="This region represents a CpG dinucleotide"
  misc_feature (61)..(61): /note="Nucleotide may be methylated to form 5-methylcytosine"
ggtcaggagcaaagcctgagtcagaatcctggtgtgctggttattatacaactcttggcacggcactaaccttcctgtgcctgtttcttggttaacaaaatgggtatgattcacagtatctt

SEQ ID NO: 22028 - DNA, 122 bp, Homo sapiens
  misc_feature (61)..(62): /note="This region represents a CpG dinucleotide"
  misc_feature (61)..(61): /note="Nucleotide may be methylated to form 5-methylcytosine"
atctgtataaaagcagggacaatacttcctttattaagcaaatatcttctgtctgcctaccgtatgcttgaccctgtgcaaatgaacaagacaaacaggagacaggatctctgccgccctgg

SEQ ID NO: 22029 - DNA, 122 bp, Homo sapiens
  misc_feature (61)..(62): /note="This region represents a CpG dinucleotide"
  misc_feature (61)..(61): /note="Nucleotide may be methylated to form 5-methylcytosine"
atgaaaacaaatagaacacataattaatattcttcctgcagcttctgaaaggcctttaggcggaacatcagtgctcattttactatctatattcaggctgcgttttgacaccatgatatttt

SEQ ID NO: 22030 - DNA, 122 bp, Homo sapiens
  misc_feature (61)..(62): /note="This region represents a CpG dinucleotide"
  misc_feature (61)..(61): /note="Nucleotide may be methylated to form 5-methylcytosine"
aagaaaaaacaaaacaaaaaaaaccttgtagagaacactcccccattccctttgataaaacgctccaatgtctcacagtccttggagtctggagggacttcctgatgtctgagatgcctgga

SEQ ID NO: 22031 - DNA, 122 bp, Homo sapiens
  misc_feature (61)..(62): /note="This region represents a CpG dinucleotide"
  misc_feature (61)..(61): /note="Nucleotide may be methylated to form 5-methylcytosine"
ttgcttattatgtagtaatcattattttaagcctttacaactaacggtttgattaaatcacgtaacactgaggtagatactattatcccttgcctgttgaggagaaagctgactcacacaaa

SEQ ID NO: 22032 - DNA, 122 bp, Homo sapiens
  misc_feature (61)..(62): /note="This region represents a CpG dinucleotide"
  misc_feature (61)..(61): /note="Nucleotide may be methylated to form 5-methylcytosine"
acaggcgtgagccaccgcgcctggcatcagtgcatactttttgaagtgattccaagttatcgcccgcttttttcgtgtaacatataaatacatctctgtatctagaaatatccaatgcataa

SEQ ID NO: 22033 - DNA, 122 bp, Homo sapiens
  misc_feature (61)..(62): /note="This region represents a CpG dinucleotide"
  misc_feature (61)..(61): /note="Nucleotide may be methylated to form 5-methylcytosine"
aaataaaaagacttaaatatccgaccctattagctaccagctgtgtgactctgggcaagtcgtgtgatatctgagcatttggttccatatgtctgcaaaattccagtatcgtcaaccccacc

SEQ ID NO: 22034 - DNA, 122 bp, Homo sapiens
  misc_feature (61)..(62): /note="This region represents a CpG dinucleotide"
  misc_feature (61)..(61): /note="Nucleotide may be methylated to form 5-methylcytosine"
aaaataaccagttgcttcctattttttttcgaggctgttttgcaccagtctgaagcctgacgcaagcaaaatctcgaaaaaacaatgctagctttcaaagcgttgaggtgcaggcctgcaga

SEQ ID NO: 22035 - DNA, 122 bp, Homo sapiens
  misc_feature (61)..(62): /note="This region represents a CpG dinucleotide"
  misc_feature (61)..(61): /note="Nucleotide may be methylated to form 5-methylcytosine"
atatcactaagaaattctgcatgtcaaacacaacattcacaagaaattcccacgggcgggcgctgcaactgctggacaccccgcccagcagcctgaaagcacgctcacgccttaggggaggc

SEQ ID NO: 22036 - DNA, 122 bp, Homo sapiens
  misc_feature (61)..(62): /note="This region represents a CpG dinucleotide"
  misc_feature (61)..(61): /note="Nucleotide may be methylated to form 5-methylcytosine"
tgtagatagtggctagaggcagggttgggtggggtggactggaacctagttcagaaactacgaaaggacctgacttctatggggaacagacacagagagtttcagatggcatcaaacaggtt

SEQ ID NO: 22037 - DNA, 122 bp, Homo sapiens
  misc_feature (61)..(62): /note="This region represents a CpG dinucleotide"
  misc_feature (61)..(61): /note="Nucleotide may be methylated to form 5-methylcytosine"
atgtgaatagctcaacataagtatcttattcaggatgggacagggccctccccacagacacgtgacaacagatcaaacatgcatttcctgtttcctgtttggtttgatctgtctgcctctca

SEQ ID NO: 22038 - DNA, 122 bp, Homo sapiens
  misc_feature (61)..(62): /note="This region represents a CpG dinucleotide"
  misc_feature (61)..(61): /note="Nucleotide may be methylated to form 5-methylcytosine"
tgccatcttcatataagagctacttttcacctttgcagtttcctttgtggttcctgtgctcgtgtatgtatatatatatatttagagtattgcaatttttctgtttcttagtttcttttact

SEQ ID NO: 22039 - DNA, 122 bp, Homo sapiens
  misc_feature (61)..(62): /note="This region represents a CpG dinucleotide"
  misc_feature (61)..(61): /note="Nucleotide may be methylated to form 5-methylcytosine"
gtgatcctcccacctcagtctcccaaagagctgggattacaggcataagccaccttgccccgccagtttttagcctgtcagctctttgagggacacttgttatggtcatacccacagctttg

SEQ ID NO: 22040 - DNA, 122 bp, Homo sapiens
  misc_feature (61)..(62): /note="This region represents a CpG dinucleotide"
  misc_feature (61)..(61): /note="Nucleotide may be methylated to form 5-methylcytosine"
tcactaagtcctgccaagagcaacactatttaactgcaggtactcaaaatccaataggcacgtttaaaggaatctcaggcttaaaagaggacaattcacaatgtgcatttgtctgagatagc

SEQ ID NO: 22041 - DNA, 122 bp, Homo sapiens
  misc_feature (61)..(62): /note="This region represents a CpG dinucleotide"
  misc_feature (61)..(61): /note="Nucleotide may be methylated to form 5-methylcytosine"
gatctgtcaggatatgggcttatatgccgcttccccccacccacctccctgaggttggtacgatttatgcttgtgcaggaacttgccctctaagttcaaggtggatgcacactgactctgcc

SEQ ID NO: 22042 - DNA, 122 bp, Homo sapiens
  misc_feature (61)..(62): /note="This region represents a CpG dinucleotide"
  misc_feature (61)..(61): /note="Nucleotide may be methylated to form 5-methylcytosine"
cgccaggcatgctgggagaagtagtttcttcaccgctttcggccgttgttcgcagggctgcgagactacaatcccagcatgcaaggggaatgggttggtgatgatacctggagagggcggtg

SEQ ID NO: 22043 - DNA, 122 bp, Homo sapiens
  misc_feature (61)..(62): /note="This region represents a CpG dinucleotide"
  misc_feature (61)..(61): /note="Nucleotide may be methylated to form 5-methylcytosine"
cggagcaggtgaatggctgactgctagacactgtgatgtctgaaggaagaaagggatggacgaagagctttactgagtccagtatcagtcaagcttcctgagggaaaagatggcgttcctga

SEQ ID NO: 22044 - DNA, 122 bp, Homo sapiens
  misc_feature (61)..(62): /note="This region represents a CpG dinucleotide"
  misc_feature (61)..(61): /note="Nucleotide may be methylated to form 5-methylcytosine"
tccacccatacagccccatgagtcagcatagtgtggcagctcctggcagcaaccccaggacgctcttagaagttagctcattggcgggctaatctgattggacacctcatactctcccagtt

SEQ ID NO: 22045 - DNA, 122 bp, Homo sapiens
  misc_feature (61)..(62): /note="This region represents a CpG dinucleotide"
  misc_feature (61)..(61): /note="Nucleotide may be methylated to form 5-methylcytosine"
ggacctggcaccaatcctctaaaggaatctaccctcaaaatgggacacttactatctcctcgcacctctgtgtagtctctccatacacaaaccattccatgccaagcactgggctagggaaa

SEQ ID NO: 22046 - DNA, 122 bp, Homo sapiens
  misc_feature (61)..(62): /note="This region represents a CpG dinucleotide"
  misc_feature (61)..(61): /note="Nucleotide may be methylated to form 5-methylcytosine"
ttgattatcaacatagtgaaggggagggtttcaaagagcaagaaggggttgttagtcacacggagagagaagaaaggagattagcagggtgactttcaccctgcaacagtcacgctggagta

SEQ ID NO: 22047 - DNA, 122 bp, Homo sapiens
  misc_feature (61)..(62): /note="This region represents a CpG dinucleotide"
  misc_feature (61)..(61): /note="Nucleotide may be methylated to form 5-methylcytosine"
cacacaggcacacacaagcacatgcacgcacatgcacacacacgcacacacatgcacgcacgtactcccacaagcacaggcagcacaccctgcaagtggcctcggagcatccccacccaggg

SEQ ID NO: 22048 - DNA, 122 bp, Homo sapiens
  misc_feature (61)..(62): /note="This region represents a CpG dinucleotide"
  misc_feature (61)..(61): /note="Nucleotide may be methylated to form 5-methylcytosine"
tgtgttttgatagagaagtgggacgccttcataaaggaaaccgaggacatcaacacgctccgggagtgtgtgcagatcctgtttaacagcagatatggtgagtgggcggcgcggcccgccgt

SEQ ID NO: 22049 - DNA, 122 bp, Homo sapiens
  misc_feature (61)..(62): /note="This region represents a CpG dinucleotide"
  misc_feature (61)..(61): /note="Nucleotide may be methylated to form 5-methylcytosine"
aggcacaatgaatccaacagcatcctcttcttcggcagattttcttctccttaagatgatcgttgccatggcattgctgcttttagcaaaaaacaactaccagtgttactcatatgattatg

SEQ ID NO: 22050 - DNA, 122 bp, Homo sapiens
  misc_feature (61)..(62): /note="This region represents a CpG dinucleotide"
  misc_feature (61)..(61): /note="Nucleotide may be methylated to form 5-methylcytosine"
aagaggtcatcacctgcagatgcggttaagcaacttgcagaggccccagggctgagccaccgcagaaccggagctggaaaccagtcctatgactcctgaggcagtgctctttctactacctg

SEQ ID NO: 22051 - DNA, 122 bp, Homo sapiens
  misc_feature (61)..(62): /note="This region represents a CpG dinucleotide"
  misc_feature (61)..(61): /note="Nucleotide may be methylated to form 5-methylcytosine"
cacagtcaatctgatgacccggtcggctactaagtgactaaccgcagggagtggtggagacgctggacaaagggatgattcacgtcctgggtgggaccgagcgggacggtgggagatttcat

SEQ ID NO: 22052 - DNA, 122 bp, Homo sapiens
  misc_feature (61)..(62): /note="This region represents a CpG dinucleotide"
  misc_feature (61)..(61): /note="Nucleotide may be methylated to form 5-methylcytosine"
tagtctttgctctttcaccaggtatctgttctgtctaaagaaaaatttcattagacaatccgagttctgaaccattggtttagcataaaatgtgtccccctaaaaaggtcctcttactggtc

SEQ ID NO: 22053 - DNA, 122 bp, Homo sapiens
  misc_feature (61)..(62): /note="This region represents a CpG dinucleotide"
  misc_feature (61)..(61): /note="Nucleotide may be methylated to form 5-methylcytosine"
gtcatgcaaggtttaaaagcccttcaatggtttcctgttgctcttgcgtttaatgacacacgtcctaaccacagctcaccgtgtcctggggcatctggttcttgcctgtctctctagcctca

SEQ ID NO: 22054 - DNA, 122 bp, Homo sapiens
  misc_feature (61)..(62): /note="This region represents a CpG dinucleotide"
  misc_feature (61)..(61): /note="Nucleotide may be methylated to form 5-methylcytosine"
ccgcccacctcggcctcccacagtgctgggactccaggcgtgagccaccgcgcccggccacgtgtgtgtgtgtgttttcacccaggtttcacagtggctctcagcaggagagctggtctgac

SEQ ID NO: 22055 - DNA, 122 bp, Homo sapiens
  misc_feature (61)..(62): /note="This region represents a CpG dinucleotide"
  misc_feature (61)..(61): /note="Nucleotide may be methylated to form 5-methylcytosine"
aaatatgatctcgagtctaagtgtgcagccttataggagcttacatatcctataggcatccgaaagtccagatgccttctcattttgggtggtgtgcttaggtgtattaataccattctctg

SEQ ID NO: 22056 - DNA, 122 bp, Homo sapiens
  misc_feature (61)..(62): /note="This region represents a CpG dinucleotide"
  misc_feature (61)..(61): /note="Nucleotide may be methylated to form 5-methylcytosine"
taggagaccttgtcgagtgattcaggtcagctctctgccttaggcaaggatcatccatgccggggcttttaagatgggatattagcctgtcatatgtatagaaaatattgaatttttttgaa

SEQ ID NO: 22057 - DNA, 122 bp, Homo sapiens
  misc_feature (61)..(62): /note="This region represents a CpG dinucleotide"
  misc_feature (61)..(61): /note="Nucleotide may be methylated to form 5-methylcytosine"
taaggaatctcttaagcagcaagcaaaaaatatgattcataaacaagtgaaaatgagtcacgtagcagtaaacagaactggggccagaaaggcagctttggagttgtccccattcatttcaa

SEQ ID NO: 22058 - DNA, 122 bp, Homo sapiens
  misc_feature (61)..(62): /note="This region represents a CpG dinucleotide"
  misc_feature (61)..(61): /note="Nucleotide may be methylated to form 5-methylcytosine"
tgaagtgtgtaccctgtgtttgggcagagcagcaagaccagacttccaaatggcatgctgcgttttaatgtgctttcataattgtctgttccaaaagggtgcctgtgtgtgtatggtgtgtg

SEQ ID NO: 22059 - DNA, 122 bp, Homo sapiens
  misc_feature (61)..(62): /note="This region represents a CpG dinucleotide"
  misc_feature (61)..(61): /note="Nucleotide may be methylated to form 5-methylcytosine"
aggtggggacccagccgctcctgcgaggcctgaagggctgactcctgcacagcgatgatgcggcagctgaagatcgggtattgccacactgaactcgctcaccaagatgtcgtgggattaat

SEQ ID NO: 22060 - DNA, 122 bp, Homo sapiens
  misc_feature (61)..(62): /note="This region represents a CpG dinucleotide"
  misc_feature (61)..(61): /note="Nucleotide may be methylated to form 5-methylcytosine"
ataaccaaatctgagtctgtgataccactgggtgtggccaacgacccacctccacatttacgcataagcaatgagcacagtatattatcatgcatgtgtctgggagagtttacaggcctggc

SEQ ID NO: 22061 - DNA, 122 bp, Homo sapiens
  misc_feature (61)..(62): /note="This region represents a CpG dinucleotide"
  misc_feature (61)..(61): /note="Nucleotide may be methylated to form 5-methylcytosine"
tcttattctgtgaattacataagtgtattgttttacaatttacaaaaaatttccacacaccgtgagtcactggattctcccaacttccctataggacagataaagcagataatttaatattt

SEQ ID NO: 22062 - DNA, 122 bp, Homo sapiens
  misc_feature (61)..(62): /note="This region represents a CpG dinucleotide"
  misc_feature (61)..(61): /note="Nucleotide may be methylated to form 5-methylcytosine"
ataagagaagcaaagactaggaaggaaatgtgccttcatggtggggggaaaagtcagtgacgagcacttcctcctattgaattgtttggggaagttttacaccagtgtccttttgtctgttt

SEQ ID NO: 22063 - DNA, 122 bp, Homo sapiens
  misc_feature (61)..(62): /note="This region represents a CpG dinucleotide"
  misc_feature (61)..(61): /note="Nucleotide may be methylated to form 5-methylcytosine"
tagctacaaggcctgggctacagcagagacagcccagcagggagggagagggtggtggagcggagggcaggagagagagtgcttctctgtgctgcctcctctgcttggctcagaaagtgtgc

SEQ ID NO: 22064 - DNA, 122 bp, Homo sapiens
  misc_feature (61)..(62): /note="This region represents a CpG dinucleotide"
  misc_feature (61)..(61): /note="Nucleotide may be methylated to form 5-methylcytosine"
ggagctacctcttcctgaatcagggacattttccaaaggagtggcacaggatttttttctcggtcactttgcaagccagggacctctggctggtgacggcccacctgggcctcgcttgacca

SEQ ID NO: 22065 - DNA, 122 bp, Homo sapiens
  misc_feature (61)..(62): /note="This region represents a CpG dinucleotide"
  misc_feature (61)..(61): /note="Nucleotide may be methylated to form 5-methylcytosine"
aatttatattttaggtgacttctaagtattaccatcataaagaacactgtgggctgggcacggtggctcatacctgtaatcccagcactttgggaggctgaggtggtccctggagctcagga

SEQ ID NO: 22066 - DNA, 122 bp, Homo sapiens
  misc_feature (61)..(62): /note="This region represents a CpG dinucleotide"
  misc_feature (61)..(61): /note="Nucleotide may be methylated to form 5-methylcytosine"
ggaaggaaggaaggaaggaaggaagaggatatggagtgattcacattcatgtggaatcaacgacacatttatttattgtttgcctcagggctattgtaacacctgtgccctctatagtatag

SEQ ID NO: 22067 - DNA, 122 bp, Homo sapiens
  misc_feature (61)..(62): /note="This region represents a CpG dinucleotide"
  misc_feature (61)..(61): /note="Nucleotide may be methylated to form 5-methylcytosine"
catgatcaactttggtccatttacaaagccgtgatcagcagaaacttcctgactagcaatcgccccctctcaaccagatataaccagttgatctggcagtagctctgctgctgtgaacctca

SEQ ID NO: 22068 - DNA, 122 bp, Homo sapiens
  misc_feature (61)..(62): /note="This region represents a CpG dinucleotide"
  misc_feature (61)..(61): /note="Nucleotide may be methylated to form 5-methylcytosine"
tcaaaaaaccccacgcgtagctcagatgctctcaggctcaggtgcctaccgaggatgtcacgcattcccagtgctagagtgaggtgatgactgataccttctgccaggttgcttgagctggc

SEQ ID NO: 22069 - DNA, 122 bp, Homo sapiens
  misc_feature (61)..(62): /note="This region represents a CpG dinucleotide"
  misc_feature (61)..(61): /note="Nucleotide may be methylated to form 5-methylcytosine"
tagacaggaaaggagtttaagtatcagagtaaatttaaataaaaatataccaagatactccgtggctagagatttgtttccctagaattacacacagacactagcacattctttcaaggaag

SEQ ID NO: 22070 - DNA, 122 bp, Homo sapiens
  misc_feature (61)..(62): /note="This region represents a CpG dinucleotide"
  misc_feature (61)..(61): /note="Nucleotide may be methylated to form 5-methylcytosine"
gcgcccggcctcaaattttgtgattattcatttaaattttgtaatcaaacattagggtgacgtgttggagctgatcccatactgtaggttcaggaaatacagtcattgcagacatcatcatt

SEQ ID NO: 22071 - DNA, 122 bp, Homo sapiens
  misc_feature (61)..(62): /note="This region represents a CpG dinucleotide"
  misc_feature (61)..(61): /note="Nucleotide may be methylated to form 5-methylcytosine"
attatcacacagcaggaagcaggcagtgtaattataacatactcccaaaccataaaaatacggaagagacttcagcaccaggagttgtgactttatacaaggagatgatagtatgtaaacta

SEQ ID NO: 22072 - DNA, 122 bp, Homo sapiens
  misc_feature (61)..(62): /note="This region represents a CpG dinucleotide"
  misc_feature (61)..(61): /note="Nucleotide may be methylated to form 5-methylcytosine"
ttaagtgggaaggaaatttattagaggaacatgagtgagcttacagaatttatgagaaagcggaagagtcagttcaaaacaacccagaaacggaggcagttcagtaggtcccgacagcaaga

SEQ ID NO: 22073 - DNA, 122 bp, Homo sapiens
  misc_feature (61)..(62): /note="This region represents a CpG dinucleotide"
  misc_feature (61)..(61): /note="Nucleotide may be methylated to form 5-methylcytosine"
gctggaaatccgccatcatgggagtattagcaccaaagaaatcaacaaacattacaaatccgggcttgatttattgttttgtggattgtctagacttaagaatgtgacagagaagtgttagt

SEQ ID NO: 22074 - DNA, 122 bp, Homo sapiens
  misc_feature (61)..(62): /note="This region represents a CpG dinucleotide"
  misc_feature (61)..(61): /note="Nucleotide may be methylated to form 5-methylcytosine"
gtcacctaatctcagtgacattccatcatgtttgccataccctatttgtcagaagcaagtcgtttgctccatcccacactcaaagggaggggattgcacaaggctgtgtattccaggagatg

SEQ ID NO: 22075 - DNA, 122 bp, Homo sapiens
  misc_feature (61)..(62): /note="This region represents a CpG dinucleotide"
  misc_feature (61)..(61): /note="Nucleotide may be methylated to form 5-methylcytosine"
agatcaacactttgataatccatcactcaaattgtctcatactatagtatcctaagcctccgtatctttggctgtaaacaagtagacttagcttgtttagatcagatgctatttctctccct

SEQ ID NO: 22076 - DNA, 122 bp, Homo sapiens
  misc_feature (61)..(62): /note="This region represents a CpG dinucleotide"
  misc_feature (61)..(61): /note="Nucleotide may be methylated to form 5-methylcytosine"
ctgcaacatcaggctgaacagggtgcgtgtgctgggactacccagggaatctcctagagccgcaggcaccagggcagggccttaaggagggttgctgggcacagtcactgcagccactccct

SEQ ID NO: 22077 - DNA, 122 bp, Homo sapiens
  misc_feature (61)..(62): /note="This region represents a CpG dinucleotide"
  misc_feature (61)..(61): /note="Nucleotide may be methylated to form 5-methylcytosine"
cgaacgagtaggaccttaaaacacaccgctccccaccttccttctgtgaagaactcaatgcgagattgatcatagtggtgatgacatgactctgtcagttgttgaagcacatggatggaagt

SEQ ID NO: 22078 - DNA, 122 bp, Homo sapiens
  misc_feature (61)..(62): /note="This region represents a CpG dinucleotide"
  misc_feature (61)..(61): /note="Nucleotide may be methylated to form 5-methylcytosine"
ctgataaaacttctgtacggattctacaaagctgccatggcaaacagcttcagtattcagcgtaacatatctgtctccatctcctgcatctgattgatacaggccctttggactgactggac

SEQ ID NO: 22079 - DNA, 122 bp, Homo sapiens
  misc_feature (61)..(62): /note="This region represents a CpG dinucleotide"
  misc_feature (61)..(61): /note="Nucleotide may be methylated to form 5-methylcytosine"
ccaagcactgtggtaccgtagcagttgttctgatcaccgaggcagttaaacagtgactgacgggcatatagcataaacaatgtggagatgctgaacaaagagatgactcacgtcccagctgg

SEQ ID NO: 22080 - DNA, 122 bp, Homo sapiens
  misc_feature (61)..(62): /note="This region represents a CpG dinucleotide"
  misc_feature (61)..(61): /note="Nucleotide may be methylated to form 5-methylcytosine"
agctctttctaattcagaactgaggtcataattcaatctgtgattgacctcagagccaagcggattttgcttaagccatgccctgacttagtatcatggcacaaacccagatcaatagagaa

SEQ ID NO: 22081 - DNA, 122 bp, Homo sapiens
  misc_feature (61)..(62): /note="This region represents a CpG dinucleotide"
  misc_feature (61)..(61): /note="Nucleotide may be methylated to form 5-methylcytosine"
gtgaactgagtaagcagagtggagggagcagagagcagaatactcacagaggagctgcagcgaaggaggaaggctaatcttctgggcagaaccccagagaggcgccagttcagtgaccgtcg

SEQ ID NO: 22082 - DNA, 122 bp, Homo sapiens
  misc_feature (61)..(62): /note="This region represents a CpG dinucleotide"
  misc_feature (61)..(61): /note="Nucleotide may be methylated to form 5-methylcytosine"
gttgaatagctcagcctgccattatgacagaatggcccaggacagactacaggcaggaagcgtcttttgtttcagggggctttggagctgttttttccctgccataaacttaattgctttct

SEQ ID NO: 22083 - DNA, 122 bp, Homo sapiens
  misc_feature (61)..(62): /note="This region represents a CpG dinucleotide"
  misc_feature (61)..(61): /note="Nucleotide may be methylated to form 5-methylcytosine"
agactacctcatggcagcatgtcacgactaacagatcactccaggcatagtagttctcatcggctcaatgaacagtcacgacatagcagcatcagagatctcagtaataatcccatgactca

SEQ ID NO: 22084 - DNA, 122 bp, Homo sapiens
  misc_feature (61)..(62): /note="This region represents a CpG dinucleotide"
  misc_feature (61)..(61): /note="Nucleotide may be methylated to form 5-methylcytosine"
ctggcttactctgtgccttgcaccattggcaactctcaggtaagtgaatcattcagtcttcgccacacacgtccctacagggctttacaaatgggcatgccatggtgcacagaggtgacata

SEQ ID NO: 22085 - DNA, 122 bp, Homo sapiens
  misc_feature (61)..(62): /note="This region represents a CpG dinucleotide"
  misc_feature (61)..(61): /note="Nucleotide may be methylated to form 5-methylcytosine"
gagctaacctcttctttctaaaattattaactttgactactagtttgcatataaccattacgtatgatttacagtgttgggcttttacaaagtgacttgggcattacttccatcctggagtt

SEQ ID NO: 22086 - DNA, 122 bp, Homo sapiens
  misc_feature (61)..(62): /note="This region represents a CpG dinucleotide"
  misc_feature (61)..(61): /note="Nucleotide may be methylated to form 5-methylcytosine"
ggccctctcccagggaggggcagggtgccagtcgggagggctggctggatgaggattgcacgctgccctgaaacgtggccagggccatcatgacatggtcacagactgttggagttggaaag

SEQ ID NO: 22087 - DNA, 122 bp, Homo sapiens
  misc_feature (61)..(62): /note="This region represents a CpG dinucleotide"
  misc_feature (61)..(61): /note="Nucleotide may be methylated to form 5-methylcytosine"
ggcttcagtgagagagccaagttcaacttttctctgtgtttgtgtgcatgcacacgtgcacgcatgcccatacatgtgtgtttgtgacatctacatggatggatgccagagggcaaggaggt

SEQ ID NO: 22088 - DNA, 122 bp, Homo sapiens
  misc_feature (61)..(62): /note="This region represents a CpG dinucleotide"
  misc_feature (61)..(61): /note="Nucleotide may be methylated to form 5-methylcytosine"
ctcttcctcctccctctatgacatttcttcctggttgtcttcctggttcctttttccccacgcaccccttcaataagggggctccccagggcttggccctggatccactctctacctgcagt

SEQ ID NO: 22089 - DNA, 122 bp, Homo sapiens
  misc_feature (61)..(62): /note="This region represents a CpG dinucleotide"
  misc_feature (61)..(61): /note="Nucleotide may be methylated to form 5-methylcytosine"
tacgagtttatttacttatagtccttagtcaagtgttctgttcctaagtgaaacagaaagcggccttgaaggaaaggagcttaatgacgctagatccagatcttgtagtcaacattaaaacc

SEQ ID NO: 22090 - DNA, 122 bp, Homo sapiens
  misc_feature (61)..(62): /note="This region represents a CpG dinucleotide"
  misc_feature (61)..(61): /note="Nucleotide may be methylated to form 5-methylcytosine"
gacaatgtcatacctactgtttggggctgttatgcggattatttattgttttttgcatgacgtcaccacattggtcatgagatgttgtgaggattaaatgaatatggtaggtggagtagggc

SEQ ID NO: 22091 - DNA, 122 bp, Homo sapiens
  misc_feature (61)..(62): /note="This region represents a CpG dinucleotide"
  misc_feature (61)..(61): /note="Nucleotide may be methylated to form 5-methylcytosine"
gcaggctccctgctcagccccactcttgggcgtgcgtccttcctgtgtcactgcctgatacgtgatagcatctgactccatgttagggcccgaattgtgtccatcccgccaaatccgtatgt

SEQ ID NO: 22092 - DNA, 122 bp, Homo sapiens
  misc_feature (61)..(62): /note="This region represents a CpG dinucleotide"
  misc_feature (61)..(61): /note="Nucleotide may be methylated to form 5-methylcytosine"
gttggctgtgcaggtgaggcagatggcatggcttgtgcttattttgtttggattagagagcgctgcactcactcagaagtcctcagttgagtcgcagatctgtgacttagtcacactgtgac

SEQ ID NO: 22093 - DNA, 122 bp, Homo sapiens
  misc_feature (61)..(62): /note="This region represents a CpG dinucleotide"
  misc_feature (61)..(61): /note="Nucleotide may be methylated to form 5-methylcytosine"
accccactgcttcaaaagttgccattccctccatcctccacagctctggccacatccagacgaaaccattaaggctggtgtataccctacagggcaggaagtgaatcatgcttcactcaact

SEQ ID NO: 22094 - DNA, 122 bp, Homo sapiens
  misc_feature (61)..(62): /note="This region represents a CpG dinucleotide"
  misc_feature (61)..(61): /note="Nucleotide may be methylated to form 5-methylcytosine"
gacccatcttcgtgaaggaagacctaaatcctcccaactcccaggggtggccctccagtacgaaggctgaaaacaaggaaccaagaaacagaaccacatgacacagggctctggtttctgaa

SEQ ID NO: 22095 - DNA, 122 bp, Homo sapiens
  misc_feature (61)..(62): /note="This region represents a CpG dinucleotide"
  misc_feature (61)..(61): /note="Nucleotide may be methylated to form 5-methylcytosine"
atataccaagtactactctaggtatttcacagacattttgtttcactcttatacaaatcccgtggaagagaaatgactttcctcattttagattctagggagtgacaggggacaagtcaaag

SEQ ID NO: 22096 - DNA, 122 bp, Homo sapiens
  misc_feature (61)..(62): /note="This region represents a CpG dinucleotide"
  misc_feature (61)..(61): /note="Nucleotide may be methylated to form 5-methylcytosine"
gggtgggaagttagactctgcctcttaacaggaggagctgaagagtcacacgggaaaggacgcaaggaagggatggaaagtggggacatttttgcaatcaatccatcatgttcacattttac

SEQ ID NO: 22097 - DNA, 122 bp, Homo sapiens
  misc_feature (61)..(62): /note="This region represents a CpG dinucleotide"
  misc_feature (61)..(61): /note="Nucleotide may be methylated to form 5-methylcytosine"
ctttgaaatagagtgctcggaggacaaacatggctccattctggaggattattactagaacgttctagagagcctgttaagcaactttgaatggattgctgcgaagtttagggctggttata

SEQ ID NO: 22098 - DNA, 122 bp, Homo sapiens
  misc_feature (61)..(62): /note="This region represents a CpG dinucleotide"
  misc_feature (61)..(61): /note="Nucleotide may be methylated to form 5-methylcytosine"
atttgtggtttatctgaattcaatcttaactgggcatcttgtatttttacttgctaaatccggcgactctaccgccggggtcggacgttgtttgctgactgcattctattcgtggccgcgga

SEQ ID NO: 22099 - DNA, 122 bp, Homo sapiens
  misc_feature (61)..(62): /note="This region represents a CpG dinucleotide"
  misc_feature (61)..(61): /note="Nucleotide may be methylated to form 5-methylcytosine"
tgctgaacctccaagcaggacacaggttgtttttctacatgtagatattgcagttaattccgtcccatggtatttaatcggacacatttattaagcctcataaagggcattttcctgttaat

SEQ ID NO: 22100 - DNA, 122 bp, Homo sapiens
  misc_feature (61)..(62): /note="This region represents a CpG dinucleotide"
  misc_feature (61)..(61): /note="Nucleotide may be methylated to form 5-methylcytosine"
acaaagaccaaaccagacagagattcacacaaaatacagcttgtccatcaggaaagttcacgtacacaaacgcatgacagctgctctaaatggtggtgaagataacattaaactgtttcagt

SEQ ID NO: 22101 - DNA, 122 bp, Homo sapiens
  misc_feature (61)..(62): /note="This region represents a CpG dinucleotide"
  misc_feature (61)..(61): /note="Nucleotide may be methylated to form 5-methylcytosine"
agaagccaacagctcacctgtgataaatcagcccattgaaggtcaatgcagtgaagtaaacggggttcgcataactgcgaatgtgcaactgcacaaactcaaggaagcaattttcagtgaca

SEQ ID NO: 22102 - DNA, 122 bp, Homo sapiens
  misc_feature (61)..(62): /note="This region represents a CpG dinucleotide"
  misc_feature (61)..(61): /note="Nucleotide may be methylated to form 5-methylcytosine"
ctcagacttttctggttgtaaagttccacatcctgggatatctctcagtcccacagaagtcggaacaactgcccaacctacaaaggaatagaaagaagactacaaacgttgcctaagcacaa

SEQ ID NO: 22103 - DNA, 122 bp, Homo sapiens
  misc_feature (61)..(62): /note="This region represents a CpG dinucleotide"
  misc_feature (61)..(61): /note="Nucleotide may be methylated to form 5-methylcytosine"
ctctgtttcagtttccccatctgtgaaaaggggaaatatagtaccttcctcatgtggtgacgagcctgatcaaatgcagcaggccttgtacagtgtgtagcagactgcctggccctggtcag

SEQ ID NO: 22104 - DNA, 122 bp, Homo sapiens
  misc_feature (61)..(62): /note="This region represents a CpG dinucleotide"
  misc_feature (61)..(61): /note="Nucleotide may be methylated to form 5-methylcytosine"
ttaattatatgctaattaagaggtggattattcagaacattctggaaaaggggccgagagcgtccagaaccatatatggtaacttccaggccattgctatggcccattgccatggcatgtgt

SEQ ID NO: 22105 - DNA, 122 bp, Homo sapiens
  misc_feature (61)..(62): /note="This region represents a CpG dinucleotide"
  misc_feature (61)..(61): /note="Nucleotide may be methylated to form 5-methylcytosine"
aacaaacacagagtgcaatcttagggaaatgccaagaccttcaccttgagcgtgtgcatgcgctgctctacagaacccaggaggcgccttccgcccacccacaggtactacagcactagctc

SEQ ID NO: 22106 - DNA, 122 bp, Homo sapiens
  misc_feature (61)..(62): /note="This region represents a CpG dinucleotide"
  misc_feature (61)..(61): /note="Nucleotide may be methylated to form 5-methylcytosine"
atccatgtaaccataatgctggtcaagacaaaaagcatttccatcagcactaaatgtccccgtgtgtcccttccagtcaactcaccaccaccacccagaggcaatcactgttctaatcctag

SEQ ID NO: 22107 - DNA, 122 bp, Homo sapiens
  misc_feature (61)..(62): /note="This region represents a CpG dinucleotide"
  misc_feature (61)..(61): /note="Nucleotide may be methylated to form 5-methylcytosine"
cccccgctgaggtttgagccctgtgcatattctagcacttgccacactctgtcttgttagcgcctgtggctgtctgctctgcatctgtgagcacagtccttgctggtctgattcatcaggtg

SEQ ID NO: 22108 - DNA, 122 bp, Homo sapiens
  misc_feature (61)..(62): /note="This region represents a CpG dinucleotide"
  misc_feature (61)..(61): /note="Nucleotide may be methylated to form 5-methylcytosine"
caaaacccacaactgccacagccacacttcctctgctgcagtaatgaaggcggggaccagcgtcaccagacaatgctcaagtctagcagggctggcagggtcccactcacactgtgggctgc

SEQ ID NO: 22109 - DNA, 122 bp, Homo sapiens
  misc_feature (61)..(62): /note="This region represents a CpG dinucleotide"
  misc_feature (61)..(61): /note="Nucleotide may be methylated to form 5-methylcytosine"
agaggaaaggagcttgggttagacatcatgcagtctgggtttattcccagctttgccactcgctaatctgtacggtcatgaaaaagtcactaagcctctctgagtatttgtttcttccttgg

SEQ ID NO: 22110 - DNA, 122 bp, Homo sapiens
  misc_feature (61)..(62): /note="This region represents a CpG dinucleotide"
  misc_feature (61)..(61): /note="Nucleotide may be methylated to form 5-methylcytosine"
tgaaagtaaaggggctctattaataattactctgagataacagcaataaaccgggactgtcgaagcaagttgagcatagggtcacccttgttactgtgccaagagtcaccatctagctgtca

SEQ ID NO: 22111 - DNA, 122 bp, Homo sapiens
  misc_feature (61)..(62): /note="This region represents a CpG dinucleotide"
  misc_feature (61)..(61): /note="Nucleotide may be methylated to form 5-methylcytosine"
gattcttatctttgtccagaaaagtacatttaagtacatagtttgttatccatttgtttgcgttgtgagaaaaagattatatggctaataaaaaaaatcaagtactaaaatagaaaacatat

SEQ ID NO: 22112 - DNA, 122 bp, Homo sapiens
  misc_feature (61)..(62): /note="This region represents a CpG dinucleotide"
  misc_feature (61)..(61): /note="Nucleotide may be methylated to form 5-methylcytosine"
atatcagatgatgatgtgaagaagcagattgtgaactgtaaagtgaaaaggtcttaaacacgagagataagcaaaggggtgtgtatttcaggtaacatacaaacacaagggaaacagacctc

SEQ ID NO: 22113 - DNA, 122 bp, Homo sapiens
  misc_feature (61)..(62): /note="This region represents a CpG dinucleotide"
  misc_feature (61)..(61): /note="Nucleotide may be methylated to form 5-methylcytosine"
tgctctaccacctgagctataccccctttacctgttaaaagctccctccttgtccacttacggtgactcaatacattcaagttccacccacaggagttctggcaagctttgtgttctaaagc

SEQ ID NO: 22114 - DNA, 122 bp, Homo sapiens
  misc_feature (61)..(62): /note="This region represents a CpG dinucleotide"
  misc_feature (61)..(61): /note="Nucleotide may be methylated to form 5-methylcytosine"
cagacaaaactgcattaccctaggattgactcagcaggttggcacacttctgaatatattcgcagtgtatccacagaggaaaataataaacttcactcacaaaaagagacacagactcttgg

SEQ ID NO: 22115 - DNA, 122 bp, Homo sapiens
  misc_feature (61)..(62): /note="This region represents a CpG dinucleotide"
  misc_feature (61)..(61): /note="Nucleotide may be methylated to form 5-methylcytosine"
cggctcacaggacagcttgctggggttgccagccggcccttgacttaaatagccctgccccgctgcattcctggcccagcccagcccagcccagcccacccctgcgtgtagtatcctccagc

SEQ ID NO: 22116 - DNA, 122 bp, Homo sapiens
  misc_feature (61)..(62): /note="This region represents a CpG dinucleotide"
  misc_feature (61)..(61): /note="Nucleotide may be methylated to form 5-methylcytosine"
ccccataccatatatgataatgctgaaaaagtttgaagtattgccagaattaccaaaatgcgccacagagacaggaagtaagcacatgctgttggaaacaaatggcagcagtagacttactg

SEQ ID NO: 22117 - DNA, 122 bp, Homo sapiens
  misc_feature (61)..(62): /note="This region represents a CpG dinucleotide"
  misc_feature (61)..(61): /note="Nucleotide may be methylated to form 5-methylcytosine"
ctcgaggctctgacttggattttccacctgtgagtcattcaacttgttccaaaggcaagacgtgtttttttttttagcaatagttttgagttgagattttttgtaatgaattccaaatgaaa

SEQ ID NO: 22118 - DNA, 122 bp, Homo sapiens
  misc_feature (61)..(62): /note="This region represents a CpG dinucleotide"
  misc_feature (61)..(61): /note="Nucleotide may be methylated to form 5-methylcytosine"
ttgtgaaatttcctaaatactatcagcctgcatatctccattttatccaagattacaccacggaagacttactttgttctaaaaataaaagccagaaacaatccttatgagtagggaagcta

SEQ ID NO: 22119 - DNA, 122 bp, Homo sapiens
  misc_feature (61)..(62): /note="This region represents a CpG dinucleotide"
  misc_feature (61)..(61): /note="Nucleotide may be methylated to form 5-methylcytosine"
caggaaaagaaaggtctgttttggctttatctagccatgtcactgagtataatgaccccacgatttcttcttcttcacattcattttgatgccaattcttttttgctgtgcttggggatttt

SEQ ID NO: 22120 - DNA, 122 bp, Homo sapiens
  misc_feature (61)..(62): /note="This region represents a CpG dinucleotide"
  misc_feature (61)..(61): /note="Nucleotide may be methylated to form 5-methylcytosine"
ccttaaatgacccagcaggcagtacatgctacatgtgtgaaccatcatcattgtcatcatcgtcatcattacccagtgtaaaaagcctctttaccagtgaaatggggcacctgacaatgcat

SEQ ID NO: 22121 - DNA, 122 bp, Homo sapiens
  misc_feature (61)..(62): /note="This region represents a CpG dinucleotide"
  misc_feature (61)..(61): /note="Nucleotide may be methylated to form 5-methylcytosine"
aaggaattcaccatcatcattctttccaaagtacttccagatcttctcggctcgcttttccggcgtgttttcatcgtctggaaggagcttcacgtcctcgggagtgatcattttgaaaatag

SEQ ID NO: 22122 - DNA, 122 bp, Homo sapiens
  misc_feature (61)..(62): /note="This region represents a CpG dinucleotide"
  misc_feature (61)..(61): /note="Nucleotide may be methylated to form 5-methylcytosine"
ttattgagaagatgaggtccctttcgtgagtctgcacggagccgccgtacaccatgaaagcgctcacttgtttaaagtttgctctaactttgtacattttttcctttttagttttggctctt

SEQ ID NO: 22123 - DNA, 122 bp, Homo sapiens
  misc_feature (61)..(62): /note="This region represents a CpG dinucleotide"
  misc_feature (61)..(61): /note="Nucleotide may be methylated to form 5-methylcytosine"
acagaagcggttggatgcttctgtgttcctcactctgactctgccttagcttttcaaaagcggctgcagtagaagaatcccctttgtgtaccggaagctctttcaaacctgtttcctgagcc

SEQ ID NO: 22124 - DNA, 122 bp, Homo sapiens
  misc_feature (61)..(62): /note="This region represents a CpG dinucleotide"
  misc_feature (61)..(61): /note="Nucleotide may be methylated to form 5-methylcytosine"
ctgtgacatctcatcgataactgccatgtcaaaaggacttggttaaatagaacagttcaacgtactgagcatggaatgaatcacagtgcttggaatatagtaattgctcaatatttattcac

SEQ ID NO: 22125 - DNA, 122 bp, Homo sapiens
  misc_feature (61)..(62): /note="This region represents a CpG dinucleotide"
  misc_feature (61)..(61): /note="Nucleotide may be methylated to form 5-methylcytosine"
tctgggaggcaagaagagcgagaagattccattctcttccagaacagcagagacacaaagcgcagagggccccaagaacactagccagccattcagtaggggcttaagtctctgcccactcc

SEQ ID NO: 22126 - DNA, 122 bp, Homo sapiens
  misc_feature (61)..(62): /note="This region represents a CpG dinucleotide"
  misc_feature (61)..(61): /note="Nucleotide may be methylated to form 5-methylcytosine"
gtgtgtggcggtccccttcctcctcctctctgccaaaaggaaatgtaacttctctgatgacgtgtccttaaatatcagccaggtgacgggctgggtgacatttaactgaaaaaaaaaaaaaa

SEQ ID NO: 22127 - DNA, 122 bp, Homo sapiens
  misc_feature (61)..(62): /note="This region represents a CpG dinucleotide"
  misc_feature (61)..(61): /note="Nucleotide may be methylated to form 5-methylcytosine"
cctggcctgagaggtggggctgactgaggatggccacgaggtacccagctgtcctaagctcgtgaatgatagaggggtaggtggtgtcacctttctcattagaatgtgctgggctgttgtgt

SEQ ID NO: 22128 - DNA, 122 bp, Homo sapiens
  misc_feature (61)..(62): /note="This region represents a CpG dinucleotide"
  misc_feature (61)..(61): /note="Nucleotide may be methylated to form 5-methylcytosine"
gtttgcaggttcctgggggcctcctctgggccggcacacaagatgggctctcggcctccacgctcctgcaccttccacagaccagcgcttgttcctcgcccagggagctgccagccccaaag

SEQ ID NO: 22129 - DNA, 122 bp, Homo sapiens
  misc_feature (61)..(62): /note="This region represents a CpG dinucleotide"
  misc_feature (61)..(61): /note="Nucleotide may be methylated to form 5-methylcytosine"
agggcagctttggatgcctcaggtcccacaggagcaaataaaccctggacttcttgatgccgtcacagcctggcagcacctgcttgtccagcagaccagccaccgctccccgattcaccatg

SEQ ID NO: 22130 - DNA, 122 bp, Homo sapiens
  misc_feature (61)..(62): /note="This region represents a CpG dinucleotide"
  misc_feature (61)..(61): /note="Nucleotide may be methylated to form 5-methylcytosine"
acaaagctggaggcccaggacctgtaaagcaagatcacgtccagtgacattcagttttgtcgagtaagacctacttcatccttgtgatcactcactctataactgtctaataaacactttcc

SEQ ID NO: 22131 - DNA, 122 bp, Homo sapiens
  misc_feature (61)..(62): /note="This region represents a CpG dinucleotide"
  misc_feature (61)..(61): /note="Nucleotide may be methylated to form 5-methylcytosine"
cttctattgtactgcttgctctataaaaatcaatgggcatataaaatttctagagacacacgccatcacacagttagcaggtactccaagcccctgaatcttctaaactaattccccacatc

SEQ ID NO: 22132 - DNA, 122 bp, Homo sapiens
  misc_feature (61)..(62): /note="This region represents a CpG dinucleotide"
  misc_feature (61)..(61): /note="Nucleotide may be methylated to form 5-methylcytosine"
ccaggccctgaatccagatcatgtccattgtacagataggccactcggtgccttgctgggcgctgcgggctgtgggctgttgtgtgtgcaatggggaggccaagaccagcccagcccaccag

SEQ ID NO: 22133 - DNA, 122 bp, Homo sapiens
  misc_feature (61)..(62): /note="This region represents a CpG dinucleotide"
  misc_feature (61)..(61): /note="Nucleotide may be methylated to form 5-methylcytosine"
gttactcacaggagtgggttcagccactcttggtgtgaaacccaaggaaaatgtctctgccgcagctgatgtcaacatgtacagcatgtgaccagcttgcattgtaagtcagacacccacat

SEQ ID NO: 22134 - DNA, 122 bp, Homo sapiens
  misc_feature (61)..(62): /note="This region represents a CpG dinucleotide"
  misc_feature (61)..(61): /note="Nucleotide may be methylated to form 5-methylcytosine"
ttcttatctcttgagtttggttttcctttcatcaaaccacagtctccacccccgacaccccgtcatgtccccggtgctcctgctgcacagatccttcagcatttgtgctgctgaatccatct

SEQ ID NO: 22135 - DNA, 122 bp, Homo sapiens
  misc_feature (61)..(62): /note="This region represents a CpG dinucleotide"
  misc_feature (61)..(61): /note="Nucleotide may be methylated to form 5-methylcytosine"
tgggattatgggcgtgagccaccatgcccagctctatagtgtctaatacagtgtattaggcgctgggctcgttctctagctttggttttctggagatggggtccaagaatttgcatgcgtaa

SEQ ID NO: 22136 - DNA, 122 bp, Homo sapiens
  misc_feature (61)..(62): /note="This region represents a CpG dinucleotide"
  misc_feature (61)..(61): /note="Nucleotide may be methylated to form 5-methylcytosine"
caggtgaagggcatggacacttgagtcaggtgactggtccaccacatgcagattgtgtcccgttgacaaaattttgtagcctttctatgccttgatcttgttgtctatgaagggaggatgac

SEQ ID NO: 22137 - DNA, 122 bp, Homo sapiens
  misc_feature (61)..(62): /note="This region represents a CpG dinucleotide"
  misc_feature (61)..(61): /note="Nucleotide may be methylated to form 5-methylcytosine"
aaatttaatttatttttaattaacataaatgtaaatagaaagagtcacatgtggcactctcgtagctactgtattggctagagtggctctagtatatgctgccaaatcccacaactgttatc

SEQ ID NO: 22138 - DNA, 122 bp, Homo sapiens
  misc_feature (61)..(62): /note="This region represents a CpG dinucleotide"
  misc_feature (61)..(61): /note="Nucleotide may be methylated to form 5-methylcytosine"
acatctgcacatacagagggtttcattgtaatcataaaaattgttttgcatttatttcatcgttagttaaaaagagactgtattggcaaaataatactttaaatcggaaagcattactgcat

SEQ ID NO: 22139 - DNA, 122 bp, Homo sapiens
  misc_feature (61)..(62): /note="This region represents a CpG dinucleotide"
  misc_feature (61)..(61): /note="Nucleotide may be methylated to form 5-methylcytosine"
acagagattggaaggtcattagagagaggtggtgggtaacgtcccacccagagagggtaacgtgaattagaagagggtgagaaatacgactgcaaaagagagctattgaaaggggaaagaga

SEQ ID NO: 22140 - DNA, 122 bp, Homo sapiens
  misc_feature (61)..(62): /note="This region represents a CpG dinucleotide"
  misc_feature (61)..(61): /note="Nucleotide may be methylated to form 5-methylcytosine"
agacacttcccccgtgcttgtggctgtcataactgcaaactctttgaatctgagacagctcgtgagctggggctgggcttctctgtacctcgtgttcaaagtctcagcgtgaccccacgccc

SEQ ID NO: 22141 - DNA, 122 bp, Homo sapiens
  misc_feature (61)..(62): /note="This region represents a CpG dinucleotide"
  misc_feature (61)..(61): /note="Nucleotide may be methylated to form 5-methylcytosine"
tggcatgcagatcactctaggtaaagcaggactgacttttataactgtcaccaaaggagacgccacatctctggtgtcctggcgcctgcatctcaaacacacagcatcttagttaattctca

SEQ ID NO: 22142 - DNA, 122 bp, Homo sapiens
  misc_feature (61)..(62): /note="This region represents a CpG dinucleotide"
  misc_feature (61)..(61): /note="Nucleotide may be methylated to form 5-methylcytosine"
aaaattgggatcttaacaaagaaaagcttgcaacagatgcatgactactgctcaaatcatcgctgaggcacttagagacccagaaaagatcttatgtttggcttgcagtgtttctaagagca

SEQ ID NO: 22143 - DNA, 122 bp, Homo sapiens
  misc_feature (61)..(62): /note="This region represents a CpG dinucleotide"
  misc_feature (61)..(61): /note="Nucleotide may be methylated to form 5-methylcytosine"
tctctgtaagagttattgcatggatgctgcttctaggggcaggcaggcaggcaggcaaaccgtgctacatatttttaagaatgtcactggggaggaaaagaaagctctctttagacactacc

SEQ ID NO: 22144 - DNA, 122 bp, Homo sapiens
  misc_feature (61)..(62): /note="This region represents a CpG dinucleotide"
  misc_feature (61)..(61): /note="Nucleotide may be methylated to form 5-methylcytosine"
tcagaccttatggggtctctggggacacagaaagaaatcagatgtagtccctgccctgagcgcctcagtctgaggggagacagagcatgcatagaccaggctgatgcagagtgactcacact

SEQ ID NO: 22145 - DNA, 122 bp, Homo sapiens
  misc_feature (61)..(62): /note="This region represents a CpG dinucleotide"
  misc_feature (61)..(61): /note="Nucleotide may be methylated to form 5-methylcytosine"
gcagagatgtggggtgtatctttgtccaggccttcaccatgaacaaggctgtggtgctcacgccaccgacttaggaggtctgaccttgaactctgggagacttgaggaatgtctgatgactc

SEQ ID NO: 22146 - DNA, 122 bp, Homo sapiens
  misc_feature (61)..(62): /note="This region represents a CpG dinucleotide"
  misc_feature (61)..(61): /note="Nucleotide may be methylated to form 5-methylcytosine"
accagtagaagatacatggccagccactcagaaagataagggaagcaattagtcaacaatcgcacctgcttctgagaacagtgacagttattcactgaagtcctgtgggccctgttcccacc

SEQ ID NO: 22147 - DNA, 122 bp, Homo sapiens
  misc_feature (61)..(62): /note="This region represents a CpG dinucleotide"
  misc_feature (61)..(61): /note="Nucleotide may be methylated to form 5-methylcytosine"
cggaagttcaaagcttctatatcaacatccagttctaccagtgctttcaaagtttccaaacgaccccaggctgcagcacaatgtaagagtgtgtaccctaacaaatggaatgaagatggtga

SEQ ID NO: 22148 - DNA, 122 bp, Homo sapiens
  misc_feature (61)..(62): /note="This region represents a CpG dinucleotide"
  misc_feature (61)..(61): /note="Nucleotide may be methylated to form 5-methylcytosine"
gacaatttaattgaggaactgaaacataggaaggaatttaatcttaacaagcaatatatccgtaagtgcaaagtactgtagtataaatcagggactgcatttcttaagcccataattatatt

SEQ ID NO: 22149 - DNA, 122 bp, Homo sapiens
  misc_feature (61)..(62): /note="This region represents a CpG dinucleotide"
  misc_feature (61)..(61): /note="Nucleotide may be methylated to form 5-methylcytosine"
taagaattcaggtgcggcttgcggactcctcagtcctgcctagagatccctgcagcccaacgccccacctcagtgctcctgagcccaatggggctcctgcgatcaaagcaggacttgtcact

SEQ ID NO: 22150 - DNA, 122 bp, Homo sapiens
  misc_feature (61)..(62): /note="This region represents a CpG dinucleotide"
  misc_feature (61)..(61): /note="Nucleotide may be methylated to form 5-methylcytosine"
ccttgttcagtagaatcctgttaagtgggtttatcaagaatcctctacacttgatgtctccgcttagtgattttccattcactgaccccgaggaacttcgctccttggctatgaatcctgag

SEQ ID NO: 22151 - DNA, 122 bp, Homo sapiens
  misc_feature (61)..(62): /note="This region represents a CpG dinucleotide"
  misc_feature (61)..(61): /note="Nucleotide may be methylated to form 5-methylcytosine"
ctgcaatagtgaaagtcgaaagctggtcctaaaacctttcggtggttgtggttgggaatacggtcagtgcctcatgcagcgtcaccttcactcgggtgtgtagctgcaacttgcacagcttc

SEQ ID NO: 22152 - DNA, 122 bp, Homo sapiens
  misc_feature (61)..(62): /note="This region represents a CpG dinucleotide"
  misc_feature (61)..(61): /note="Nucleotide may be methylated to form 5-methylcytosine"
ctgtctcctccgggcggcgtggcaggtggctgggccaagatggctgcagcgcttcctgggcgctgctgcgtgttgaaacccgtctgtgacgtggccagcggtgttgaaataagtgcctgtgc

SEQ ID NO: 22153 - DNA, 122 bp, Homo sapiens
  misc_feature (61)..(62): /note="This region represents a CpG dinucleotide"
  misc_feature (61)..(61): /note="Nucleotide may be methylated to form 5-methylcytosine"
cagctgatctcaaggcttcaaatggagccctcaggctgtcagaggcttactgtggccaaccgacctttacttcacagaaggacaagttagccatcctggtgaatgggcaaagtcaagcagct

SEQ ID NO: 22154 - DNA, 122 bp, Homo sapiens
  misc_feature (61)..(62): /note="This region represents a CpG dinucleotide"
  misc_feature (61)..(61): /note="Nucleotide may be methylated to form 5-methylcytosine"
atgaagagcagagctttgctgctagagctgaatcagagcaacaccccttaccttttagggcgtatgatttatttactgctgggtctccggtatctaatatagtgcctggcacttggtaggtg

SEQ ID NO: 22155 - DNA, 122 bp, Homo sapiens
  misc_feature (61)..(62): /note="This region represents a CpG dinucleotide"
  misc_feature (61)..(61): /note="Nucleotide may be methylated to form 5-methylcytosine"
gagcttgtaggttttcagccaagggcaaggccggctgagctgtgtcctgctgtcactcagcgtccccaccctccaggaggtaggggcagaggcatgaaggaggctgagctggcaagacactg

SEQ ID NO: 22156 - DNA, 122 bp, Homo sapiens
  misc_feature (61)..(62): /note="This region represents a CpG dinucleotide"
  misc_feature (61)..(61): /note="Nucleotide may be methylated to form 5-methylcytosine"
aattacttgactgtcagcctaggctgcactctggggcttttactcctttcaacacagctgcgctcccggctttgatgctgctgtccacgcagcttgtcccagccacagcctggctctcagta

SEQ ID NO: 22157 - DNA, 122 bp, Homo sapiens
  misc_feature (61)..(62): /note="This region represents a CpG dinucleotide"
  misc_feature (61)..(61): /note="Nucleotide may be methylated to form 5-methylcytosine"
agcttctagttgggaaccacaggaccagctgagttacaactcactcactggtccaggtgacgtcagctggttgtcagaaatgcaaaagtcagaataacatctcagaaggccaatcttaggtt

SEQ ID NO: 22158 - DNA, 122 bp, Homo sapiens
  misc_feature (61)..(62): /note="This region represents a CpG dinucleotide"
  misc_feature (61)..(61): /note="Nucleotide may be methylated to form 5-methylcytosine"
agtagtaactgaggtgtggtgattagcgaaaggtcactcctgccgtgccaccttccgtgccgatttccctacctaacacggggccagggaaggcagcgagcgcaataaatcagaacacaggt

SEQ ID NO: 22159 - DNA, 122 bp, Homo sapiens
  misc_feature (61)..(62): /note="This region represents a CpG dinucleotide"
  misc_feature (61)..(61): /note="Nucleotide may be methylated to form 5-methylcytosine"
accaggattggttgtgcggccttgtccagggctggcactgataagatccaaggcggtgtccgctgaatgaaccaggctgctgaccagggtgctgtgagcaattcccatcgcttccctctggg

SEQ ID NO: 22160 - DNA, 122 bp, Homo sapiens
  misc_feature (61)..(62): /note="This region represents a CpG dinucleotide"
  misc_feature (61)..(61): /note="Nucleotide may be methylated to form 5-methylcytosine"
ccatatgactctctctgcctcaagagggagctattttcagagttcagtccaggcaggaagcgagtccacccacgaaggcaccaccctgtcacctgagtacgtggaaggcaatcacgggcaag

SEQ ID NO: 22161 - DNA, 122 bp, Homo sapiens
  misc_feature (61)..(62): /note="This region represents a CpG dinucleotide"
  misc_feature (61)..(61): /note="Nucleotide may be methylated to form 5-methylcytosine"
actatgcaacttcttggcagcaatacatgtacttaccaataccaatcactgttgtgatcccgcctagccaactaccagcaagtctgcactaagtctacaattcaaaggtgagaactttcctg

SEQ ID NO: 22162 - DNA, 122 bp, Homo sapiens
  misc_feature (61)..(62): /note="This region represents a CpG dinucleotide"
  misc_feature (61)..(61): /note="Nucleotide may be methylated to form 5-methylcytosine"
cttcttttatgccaaatggtgttaatggcttcccactgttgctaacccaaggatgcttcacgatcccatgttggtttccattaattttgcccgtatctttgtaaatagtgcttttattcttt

SEQ ID NO: 22163 - DNA, 122 bp, Homo sapiens
  misc_feature (61)..(62): /note="This region represents a CpG dinucleotide"
  misc_feature (61)..(61): /note="Nucleotide may be methylated to form 5-methylcytosine"
cacagagtcgagaattttgagactagtggtaacttctttcgccagtccctaatgacatcacgttagagggtgtgggacagtgtgattaactctaagtgtttaaggtcttttgcaataggcat

SEQ ID NO: 22164 - DNA, 122 bp, Homo sapiens
  misc_feature (61)..(62): /note="This region represents a CpG dinucleotide"
  misc_feature (61)..(61): /note="Nucleotide may be methylated to form 5-methylcytosine"
gttcatttcaacatcatcttaatcccatgtaactaacagcggtagaatcaataaaacccacgtgtaatgggaagaccacaaatctatttacctgtttgaatcaggcaagtacctaccctgtt

SEQ ID NO: 22165 - DNA, 122 bp, Homo sapiens
  misc_feature (61)..(62): /note="This region represents a CpG dinucleotide"
  misc_feature (61)..(61): /note="Nucleotide may be methylated to form 5-methylcytosine"
caggaggcactgtggagccaggtactccagcaccccaggccgagagcccaggagaaccctcgtgttgtggatgcagatgcgaagggctatggggagacaaggaagagatttttctaggcaac

SEQ ID NO: 22166 - DNA, 122 bp, Homo sapiens
  misc_feature (61)..(62): /note="This region represents a CpG dinucleotide"
  misc_feature (61)..(61): /note="Nucleotide may be methylated to form 5-methylcytosine"
gatatatgcatatgcctaagtgcccgaaacatttaccaagatacagagcattgctatcaccgcagaaagtttctttctgctctttcgcaatcattttctaccctagcccctctgagacagct

SEQ ID NO: 22167 - DNA, 122 bp, Homo sapiens
  misc_feature (61)..(62): /note="This region represents a CpG dinucleotide"
  misc_feature (61)..(61): /note="Nucleotide may be methylated to form 5-methylcytosine"
tgacatttcccttcactaccaccctcccacaaaccgctcctcccccgttcctctgccacgcgcagcctcacttccttgctgaaatcatgcaaggccgtttgccctgggtaaaaatgctcatg

SEQ ID NO: 22168 - DNA, 122 bp, Homo sapiens
  misc_feature (61)..(62): /note="This region represents a CpG dinucleotide"
  misc_feature (61)..(61): /note="Nucleotide may be methylated to form 5-methylcytosine"
tcacgtctacttcactaaatatccaagatcctggatgagtgttttcgccattgtacctaacggagagctgattgacagcacttaaactgaggggaaatgactaatgttttgtctggaaatgt

SEQ ID NO: 22169 - DNA, 122 bp, Homo sapiens
  misc_feature (61)..(62): /note="This region represents a CpG dinucleotide"
  misc_feature (61)..(61): /note="Nucleotide may be methylated to form 5-methylcytosine"
tagcaaatgactttgtaagcactgagcagctccccttaactgtttaagtgggaagccagccgtcgcctaccccaggcaggggaggcaggacttctccagtggctcaggggagactgcccttc

SEQ ID NO: 22170 - DNA, 122 bp, Homo sapiens
  misc_feature (61)..(62): /note="This region represents a CpG dinucleotide"
  misc_feature (61)..(61): /note="Nucleotide may be methylated to form 5-methylcytosine"
cgttttccttttatcaggtcctagagccaccagtcactgtttctggtctggacaaggctgcgtcacctacagagccacaggcctggttcactctccccaggcatctctgctgggttcctcct

SEQ ID NO: 22171 - DNA, 122 bp, Homo sapiens
  misc_feature (61)..(62): /note="This region represents a CpG dinucleotide"
  misc_feature (61)..(61): /note="Nucleotide may be methylated to form 5-methylcytosine"
ctattcattatcaagctagacatagataacctgactggtgccttgcctgaaacagatgcccgtgagctggtctggaaatgctgaggaactgagaaacactattctagaaattctgactaggt

SEQ ID NO: 22172 - DNA, 122 bp, Homo sapiens
  misc_feature (61)..(62): /note="This region represents a CpG dinucleotide"
  misc_feature (61)..(61): /note="Nucleotide may be methylated to form 5-methylcytosine"
tgatgtcctgctgcctaatggctctacataagagagttttatcacttccctggttccaaacgccagaaagaccacgccagctatccagagcagacaccgaatacaggagccatacagcatgc

SEQ ID NO: 22173 - DNA, 122 bp, Homo sapiens
  misc_feature (61)..(62): /note="This region represents a CpG dinucleotide"
  misc_feature (61)..(61): /note="Nucleotide may be methylated to form 5-methylcytosine"
gacacaaatcatgcaacagtgacatcaccagccccagagtctgtctctaagaatactgggcgcatttcctgtctcacaggtgaaagtattgcgctccccaactccagcagcctttctagcca

SEQ ID NO: 22174 - DNA, 122 bp, Homo sapiens
  misc_feature (61)..(62): /note="This region represents a CpG dinucleotide"
  misc_feature (61)..(61): /note="Nucleotide may be methylated to form 5-methylcytosine"
ggtgatccacctaccttggcctcccaaagtgctgggattataggtgtgagtcactgtacccggccaggatgattctattctaagaagctaggagaacattccagatactcctccagaaacta

SEQ ID NO: 22175 - DNA, 122 bp, Homo sapiens
  misc_feature (61)..(62): /note="This region represents a CpG dinucleotide"
  misc_feature (61)..(61): /note="Nucleotide may be methylated to form 5-methylcytosine"
aatgtgtgtccatgagtgactactgaagccctcaggtgctctggtgacttcatatgcaagcgtggcctggcaggaactgcctgtgctatgactaatcaggagactttccagggaaaaggatg

SEQ ID NO: 22176 - DNA, 122 bp, Homo sapiens
  misc_feature (61)..(62): /note="This region represents a CpG dinucleotide"
  misc_feature (61)..(61): /note="Nucleotide may be methylated to form 5-methylcytosine"
aaaacaactggattgaccaaagaggttaagaaaacatagtctttgacccatccatgtagacggcataggaacacagacttagagagcaaacaagaaggcaccataaacgctattgggaaacc

SEQ ID NO: 22177 - DNA, 122 bp, Homo sapiens
  misc_feature (61)..(62): /note="This region represents a CpG dinucleotide"
  misc_feature (61)..(61): /note="Nucleotide may be methylated to form 5-methylcytosine"
cccaatactttgatgtctagaaatggatctcagtcagttgttgttgaagtcctcctaaaacggcatttgatttaattcaacacatactgagaccacagtcagccttctcacaggcgaggagg

SEQ ID NO: 22178 - DNA, 122 bp, Homo sapiens
  misc_feature (61)..(62): /note="This region represents a CpG dinucleotide"
  misc_feature (61)..(61): /note="Nucleotide may be methylated to form 5-methylcytosine"
gtctggaggattttcctctgaggaaggtaagattgaaggtatctggactggggaaacttccggcacagttgtgaacagataagccagactgaaaatgctgaaaatgaggggattaagtgacc

SEQ ID NO: 22179 - DNA, 122 bp, Homo sapiens
  misc_feature (61)..(62): /note="This region represents a CpG dinucleotide"
  misc_feature (61)..(61): /note="Nucleotide may be methylated to form 5-methylcytosine"
gcctcagtctgtgagtcttccctgggacctgtttccccaagtggtgccgaggcaaatggccggatgacgacatttcaagggtgttattggccatctgaaggatctgggactttccctttttt

SEQ ID NO: 22180 - DNA, 122 bp, Homo sapiens
  misc_feature (61)..(62): /note="This region represents a CpG dinucleotide"
  misc_feature (61)..(61): /note="Nucleotide may be methylated to form 5-methylcytosine"
aagtgaggtttaaagcagagaaggtagcccctaggggcagccccatggggtcaaggacagcggcaagatgacccagaggggcccttggtggacccaggggacctgaccaccacctggaaact

SEQ ID NO: 22181 - DNA, 122 bp, Homo sapiens
  misc_feature (61)..(62): /note="This region represents a CpG dinucleotide"
  misc_feature (61)..(61): /note="Nucleotide may be methylated to form 5-methylcytosine"
gtgtgtgtcaggcaccttgctgggagccttccttggattacctcaatgctgtccttaggacggtatcacaagacaagtgctgttattcccattttatagacaaggaaactaggagtaggaga

SEQ ID NO: 22182 - DNA, 122 bp, Homo sapiens
  misc_feature (61)..(62): /note="This region represents a CpG dinucleotide"
  misc_feature (61)..(61): /note="Nucleotide may be methylated to form 5-methylcytosine"
aaagaactgtgcgaaattcacccttgttttgccgaaagaggaagtacaactgaaggtgagcgaggagaaacagtagtctgtaaagggttgtggttataaataacattcttcacatccagtgg

SEQ ID NO: 22183 - DNA, 122 bp, Homo sapiens
  misc_feature (61)..(62): /note="This region represents a CpG dinucleotide"
  misc_feature (61)..(61): /note="Nucleotide may be methylated to form 5-methylcytosine"
ggtactcagtgtgcactgaaaactcaccctggaatatgaacacagaagtcctcccatgaacgtcagctcaccaagtaggagctttagagcctggaaatgagcccaggctggcctcacctaga

SEQ ID NO: 22184 - DNA, 122 bp, Homo sapiens
  misc_feature (61)..(62): /note="This region represents a CpG dinucleotide"
  misc_feature (61)..(61): /note="Nucleotide may be methylated to form 5-methylcytosine"
atcgagtgatcctttgcctccctcttctaaaacagcagcatttctgctcagtgttgtactcgaatgtgctgtggactgtgctgaagcctcaacatttctcaatctctacacagaaccctaat

SEQ ID NO: 22185 - DNA, 122 bp, Homo sapiens
  misc_feature (61)..(62): /note="This region represents a CpG dinucleotide"
  misc_feature (61)..(61): /note="Nucleotide may be methylated to form 5-methylcytosine"
ctcacgtcatcttctgtctttgtgtctgtctctgtgtctatgtttcccctttctctaaggcgcagtcatactgggcccaccctactggctttgtcttgactacctctgcaaagaccctatta

SEQ ID NO: 22186 - DNA, 122 bp, Homo sapiens
  misc_feature (61)..(62): /note="This region represents a CpG dinucleotide"
  misc_feature (61)..(61): /note="Nucleotide may be methylated to form 5-methylcytosine"
cttccacaaattaagctactaaggacattttcctgctcatattcatcatttgcgtgtcctcgtggtgttgcatttgatagtggaaaatattatcagcatattattccaatgactttggcaaa

SEQ ID NO: 22187 - DNA, 122 bp, Homo sapiens
  misc_feature (61)..(62): /note="This region represents a CpG dinucleotide"
  misc_feature (61)..(61): /note="Nucleotide may be methylated to form 5-methylcytosine"
tggggagagctgcacagctgtcggcagcacagctggaaccacagcccagcggtctcagtgcgtatcacaaaggctagcttgtgagtggatgctcccaagtcacatgacccccaggtaggaag

SEQ ID NO: 22188 - DNA, 122 bp, Homo sapiens
  misc_feature (61)..(62): /note="This region represents a CpG dinucleotide"
  misc_feature (61)..(61): /note="Nucleotide may be methylated to form 5-methylcytosine"
aaaaacaaacaaacaaaaaaacactggcgcttgggtccgtcgctgcctcggtgtccctgtcgggcttcccagcagcggcctagtggaaaagtaaaagatgtctgaatatattcgggtaaccg

SEQ ID NO: 22189 - DNA, 122 bp, Homo sapiens
  misc_feature (61)..(62): /note="This region represents a CpG dinucleotide"
  misc_feature (61)..(61): /note="Nucleotide may be methylated to form 5-methylcytosine"
tgcctcccatccatcctcctatgccagtcaccaaattagtagcctcctctactccaatcccgcagggcctcctggcctctggcaacaagatgaggaaactcaggcacaaaaatgtttaagca

SEQ ID NO: 22190 - DNA, 122 bp, Homo sapiens
  misc_feature (61)..(62): /note="This region represents a CpG dinucleotide"
  misc_feature (61)..(61): /note="Nucleotide may be methylated to form 5-methylcytosine"
tgcttgttgttcttacccaagacccagtatctgccaaaacaaatgtatgtgagtgataaacgctgagaggaatgtctgttggaccacaggaaatttcctgttcaggaagagatcttgggaac

SEQ ID NO: 22191 - DNA, 122 bp, Homo sapiens
  misc_feature (61)..(62): /note="This region represents a CpG dinucleotide"
  misc_feature (61)..(61): /note="Nucleotide may be methylated to form 5-methylcytosine"
tagcttaaggaagagctccatgtcataactcttaacttaaagggcttactacttagattacggctgccaatcatcaattcacttttcatttttttcttaaagggacagcttacaaagcaaat

SEQ ID NO: 22192 - DNA, 122 bp, Homo sapiens
  misc_feature (61)..(62): /note="This region represents a CpG dinucleotide"
  misc_feature (61)..(61): /note="Nucleotide may be methylated to form 5-methylcytosine"
ggaactccttctccagacatgcttcctgaggctggctccctgtggctactgaagctgctccgggacatccagttggcccagttttactggcccatccttgaggagcttaatgtcactcggcc

SEQ ID NO: 22193 - DNA, 122 bp, Homo sapiens
  misc_feature (61)..(62): /note="This region represents a CpG dinucleotide"
  misc_feature (61)..(61): /note="Nucleotide may be methylated to form 5-methylcytosine"
ataaagtcaaagaggaaaacttaccagtaatctagagcattcaaaatcaggaacagaaaacgatacagaagaaagcgagaagcaataagaaggaacaccatttagggcttaacttcccacca

SEQ ID NO: 22194 - DNA, 122 bp, Homo sapiens
  misc_feature (61)..(62): /note="This region represents a CpG dinucleotide"
  misc_feature (61)..(61): /note="Nucleotide may be methylated to form 5-methylcytosine"
ctatcacatccttgtttagcaatgatcatccttttgcattacaaactagaaaagcaactccgtaagactaacaaactctcttcaaccaagtaaaggagactccttgtggaggggagcccctg

SEQ ID NO: 22195 - DNA, 122 bp, Homo sapiens
  misc_feature (61)..(62): /note="This region represents a CpG dinucleotide"
  misc_feature (61)..(61): /note="Nucleotide may be methylated to form 5-methylcytosine"
gagttactaatgacttctatcaaatcaccttttgctgactcccgtgttagtcctggatagcgtccttggcacacttgatttcagattttgacaggtgataaaagcacatattgagattgctg

SEQ ID NO: 22196 - DNA, 122 bp, Homo sapiens
  misc_feature (61)..(62): /note="This region represents a CpG dinucleotide"
  misc_feature (61)..(61): /note="Nucleotide may be methylated to form 5-methylcytosine"
cttgttgcttgagggcacttatggtctctgtgggccaaatctcctcataagctatctgaccgtcaggtgctggtctcccaggagtcccagggaattgattccaaagctgggaagaggcagtc

SEQ ID NO: 22197 - DNA, 122 bp, Homo sapiens
  misc_feature (61)..(62): /note="This region represents a CpG dinucleotide"
  misc_feature (61)..(61): /note="Nucleotide may be methylated to form 5-methylcytosine"
tacaagaaaaacaataatgaccttgaacttcagtcacttaagtattcacctggataaatacgctcactgaactaactacctaatacttcctagacatgtttaatccttagaccttaaaatac

SEQ ID NO: 22198 - DNA, 122 bp, Homo sapiens
  misc_feature (61)..(62): /note="This region represents a CpG dinucleotide"
  misc_feature (61)..(61): /note="Nucleotide may be methylated to form 5-methylcytosine"
gagggttccatggaatacatttccacaagacatcagtaggggtaggtctgtggtccaatacgtttgggaaacaccaaattaaagttaaaacaatggttccttcctgtattactcatcagagc

SEQ ID NO: 22199 - DNA, 122 bp, Homo sapiens
  misc_feature (61)..(62): /note="This region represents a CpG dinucleotide"
  misc_feature (61)..(61): /note="Nucleotide may be methylated to form 5-methylcytosine"
aacagacaggattcagacaagattacagctccaagggttgatctgtgtatttcccttgcacgctgctctcttgctggcaccgaagggcaccccagtccagactggtcagaaacaaacactca

SEQ ID NO: 22200 - DNA, 122 bp, Homo sapiens
  misc_feature (61)..(62): /note="This region represents a CpG dinucleotide"
  misc_feature (61)..(61): /note="Nucleotide may be methylated to form 5-methylcytosine"
ttgaattgcaagtggggaaaatcccagcctagatgtagtataactaaggttttattagagcgctggcaaactgatgactacagcttattgaaatttgggctgggcacaatggctcacacctg

SEQ ID NO: 22201 - DNA, 122 bp, Homo sapiens
  misc_feature (61)..(62): /note="This region represents a CpG dinucleotide"
  misc_feature (61)..(61): /note="Nucleotide may be methylated to form 5-methylcytosine"
ttttgatggacagatcttaattgtatacatcgtgggataggggatcattcatttttataccgaggtatgtttgaatattttgtgaatgaggcttagagaggttaagtaattggctcagagtt

SEQ ID NO: 22202 - DNA, 122 bp, Homo sapiens
  misc_feature (61)..(62): /note="This region represents a CpG dinucleotide"
  misc_feature (61)..(61): /note="Nucleotide may be methylated to form 5-methylcytosine"
taactgtgatgttgccatggctttaaatcagctgcatacacaagacagagctgcaggggccgcctgcccctgaggcaggcaatgagggatgtttgtagagaatttaaacacaataacacagc

SEQ ID NO: 22203 - DNA, 122 bp, Homo sapiens
  misc_feature (61)..(62): /note="This region represents a CpG dinucleotide"
  misc_feature (61)..(61): /note="Nucleotide may be methylated to form 5-methylcytosine"
cacaatgaatgcccagcctcatgcagttcctgttggtctgtagcaaatcagtttctgtatcgttcggtacaatgcaaacagaagcctcttccttgtggcctttgcaggaaatgattgttgtc

SEQ ID NO: 22204 - DNA, 122 bp, Homo sapiens
  misc_feature (61)..(62): /note="This region represents a CpG dinucleotide"
  misc_feature (61)..(61): /note="Nucleotide may be methylated to form 5-methylcytosine"
gtaataatcaccacatgggttacataacttccggcccacggatgaagtaagggcaatgaacgcgatattctctaaagaacatttgggtcaagatggctgtctttactttcccgtttatgtag

SEQ ID NO: 22205 - DNA, 122 bp, Homo sapiens
  misc_feature (61)..(62): /note="This region represents a CpG dinucleotide"
  misc_feature (61)..(61): /note="Nucleotide may be methylated to form 5-methylcytosine"
aggaacatccttaatgacccagatttcttttaaccttcaagatgcaagtcatcccttaaacgcagtcataagcccagaggcaaagttaatgacctgtagttccttctgtgcaggagtgagat

SEQ ID NO: 22206 - DNA, 122 bp, Homo sapiens
  misc_feature (61)..(62): /note="This region represents a CpG dinucleotide"
  misc_feature (61)..(61): /note="Nucleotide may be methylated to form 5-methylcytosine"
actgcctctccgtctgtcaactgctgctgctccagaataaacaggcagccgggcttctcgcggttgtggagaagcagcccatgctacacagaagaactgcagttgctaaactggccgcatac

SEQ ID NO: 22207 - DNA, 122 bp, Homo sapiens
  misc_feature (61)..(62): /note="This region represents a CpG dinucleotide"
  misc_feature (61)..(61): /note="Nucleotide may be methylated to form 5-methylcytosine"
gcatcagcagtctcagagtctgtttatatagtatccattcacactagtcaatctaggagtcgagatgaaggatcagaggatggtttcctttccccctctcccccgctacttctttgccctcc

SEQ ID NO: 22208 - DNA, 122 bp, Homo sapiens
  misc_feature (61)..(62): /note="This region represents a CpG dinucleotide"
  misc_feature (61)..(61): /note="Nucleotide may be methylated to form 5-methylcytosine"
aaaagtgtcaaatgccttgatgtctcccacagatcctagccaagagtcatactacaaattcgcaaaggaagattaagtttttcagataacaattaaagtaacaattaatccattgagataat

SEQ ID NO: 22209 - DNA, 122 bp, Homo sapiens
  misc_feature (61)..(62): /note="This region represents a CpG dinucleotide"
  misc_feature (61)..(61): /note="Nucleotide may be methylated to form 5-methylcytosine"
gtaagttcctaccaacttggcagcatactcctggtgaggtgaagctcctcaacattactacgtcttaccaaaatcatggttttgtatctagacttagaaatagattatctgaattctccatc

SEQ ID NO: 22210 - DNA, 122 bp, Homo sapiens
  misc_feature (61)..(62): /note="This region represents a CpG dinucleotide"
  misc_feature (61)..(61): /note="Nucleotide may be methylated to form 5-methylcytosine"
agtaaatgtctaataagtagtagctattattaccaaggtgatagatttaacaggaaaaagcgacccctggcaacaccccagtgtgttgcatgccacagcgccctcagtgttttcactgctgg

SEQ ID NO: 22211 - DNA, 122 bp, Homo sapiens
  misc_feature (61)..(62): /note="This region represents a CpG dinucleotide"
  misc_feature (61)..(61): /note="Nucleotide may be methylated to form 5-methylcytosine"
aagatttggtttcaaaaccgccgaatgaaactcaagaagatgagccgagagaaccggatccgagaactgaccgccaacctcacgttttcttaggtctgaggccggtctgaggccggtcagag

SEQ ID NO: 22212 - DNA, 122 bp, Homo sapiens
  misc_feature (61)..(62): /note="This region represents a CpG dinucleotide"
  misc_feature (61)..(61): /note="Nucleotide may be methylated to form 5-methylcytosine"
ccccccaccgccacaagacaggcagaggaggaggaggtgaggatgtgggaaggaaattctcggtttaaaaaaaccacattgtggttctaaatgtcatcaaaggtgaaacttgcttccttagc

SEQ ID NO: 22213 - DNA, 122 bp, Homo sapiens
  misc_feature (61)..(62): /note="This region represents a CpG dinucleotide"
  misc_feature (61)..(61): /note="Nucleotide may be methylated to form 5-methylcytosine"
aaatgtgtttcttatgtaatgtttgcaggcagggtttcctgttgtacagcctacagcccccgcaagataaagcaccccttggaaaagaacaagatgacaaagatcctagttcttggaggagg

SEQ ID NO: 22214 - DNA, 122 bp, Homo sapiens
  misc_feature (61)..(62): /note="This region represents a CpG dinucleotide"
  misc_feature (61)..(61): /note="Nucleotide may be methylated to form 5-methylcytosine"
gtttttatttttgcctcctttgtaatcatagtgtccggatagttttgggtcctgctctctcgcatttgctttgtgaagagctagttcccatgtgaccatggggtctgggcaactgtcttctt

SEQ ID NO: 22215 - DNA, 122 bp, Homo sapiens
  misc_feature (61)..(62): /note="This region represents a CpG dinucleotide"
  misc_feature (61)..(61): /note="Nucleotide may be methylated to form 5-methylcytosine"
gtcactggtgtgttatttccttttttcctggcatctgctctatgtaacactgtacacacacgtgatacagcagctcattaaactgtttcagttaactctgaaaccaaattagtgcattacat

SEQ ID NO: 22216 - DNA, 122 bp, Homo sapiens
  misc_feature (61)..(62): /note="This region represents a CpG dinucleotide"
  misc_feature (61)..(61): /note="Nucleotide may be methylated to form 5-methylcytosine"
ttatagcagataccagtaggatcccagattcttcctggcctttatctgttccttcaaaaacgctgtgcaagtctgggcatcttcccaccctgcctctcccttcttctttctctctccacccc

SEQ ID NO: 22217 - DNA, 122 bp, Homo sapiens
  misc_feature (61)..(62): /note="This region represents a CpG dinucleotide"
  misc_feature (61)..(61): /note="Nucleotide may be methylated to form 5-methylcytosine"
aaatatttcaaagagttgctgagagatgttaacggtacagtccatcgagagtacctggcacgtagtagagacttgacaagtgccacctccgcttgccagcccctaaacttgggctccctcac

SEQ ID NO: 22218 - DNA, 122 bp, Homo sapiens
  misc_feature (61)..(62): /note="This region represents a CpG dinucleotide"
  misc_feature (61)..(61): /note="Nucleotide may be methylated to form 5-methylcytosine"
ctgttggtgtctcgatgctcctctcttctgctctggctcttatatacccatctccctgggcgtcagcctattactgagggtttttcccccatgtttcagtttatagttatttccataaaaaa

SEQ ID NO: 22219 - DNA, 122 bp, Homo sapiens
  misc_feature (61)..(62): /note="This region represents a CpG dinucleotide"
  misc_feature (61)..(61): /note="Nucleotide may be methylated to form 5-methylcytosine"
ctcaacactgctggaatgtgttattttgaaatctgacaatgaactacagaatggtaaaagcggaagagcctttgagacaaattagtctagcccagagtagggaagaaaaagagagggaggct

SEQ ID NO: 22220 - DNA, 122 bp, Homo sapiens
  misc_feature (61)..(62): /note="This region represents a CpG dinucleotide"
  misc_feature (61)..(61): /note="Nucleotide may be methylated to form 5-methylcytosine"
aataacactcaccaaatattccatgtgcttcctcacatttgctagtttttttgttgtaggcgaggccatgtgattagtcctgagagaaagcattgtgagtcatttccaagctgcagtaccta

SEQ ID NO: 22221 - DNA, 122 bp, Homo sapiens
  misc_feature (61)..(62): /note="This region represents a CpG dinucleotide"
  misc_feature (61)..(61): /note="Nucleotide may be methylated to form 5-methylcytosine"
tctcttctgtctgggtgagtattgctatctacttccagcaagaaggaaactaaagcacagcgacaccaggtgatttgcctaaagtcacacagccatctgggtagtgacaggattagaaacca

SEQ ID NO: 22222 - DNA, 122 bp, Homo sapiens
  misc_feature (61)..(62): /note="This region represents a CpG dinucleotide"
  misc_feature (61)..(61): /note="Nucleotide may be methylated to form 5-methylcytosine"
acctgtgggtcacagtcctcaggatatgttgtaactcatttaaccctcaaaatcaccttccgaggtatgagcagagttattcaccctgctcagaaaactggtgttgagaaatgttcagaaac

SEQ ID NO: 22223 - DNA, 122 bp, Homo sapiens
  misc_feature (61)..(62): /note="This region represents a CpG dinucleotide"
  misc_feature (61)..(61): /note="Nucleotide may be methylated to form 5-methylcytosine"
acgtgagtatgcggtgactcacagtctggctgttccttcttctccatggagctgcagaaacgctcctccccaccttgataaggcgctgttgggttaataaactacagacactcaagtgctct

SEQ ID NO: 22224 - DNA, 122 bp, Homo sapiens
  misc_feature (61)..(62): /note="This region represents a CpG dinucleotide"
  misc_feature (61)..(61): /note="Nucleotide may be methylated to form 5-methylcytosine"
taaggaggaggggtgatgtcatggattggtcagattcaagagaactgaaccacaggcctgcgtggaacctcagtgtgtgaagtaaagggattaaaggctagtctcaggctggggatggctcc

SEQ ID NO: 22225 - DNA, 122 bp, Homo sapiens
  misc_feature (61)..(62): /note="This region represents a CpG dinucleotide"
  misc_feature (61)..(61): /note="Nucleotide may be methylated to form 5-methylcytosine"
gctcctgcacttttcatttcagtcagctgagcagggtttctacatcctatttgcctccctcggagaagaggaaatttctgcaaattattttctgtttattcttgtggtaaggtaattcactt

SEQ ID NO: 22226 - DNA, 122 bp, Homo sapiens
  misc_feature (61)..(62): /note="This region represents a CpG dinucleotide"
  misc_feature (61)..(61): /note="Nucleotide may be methylated to form 5-methylcytosine"
taatagaaataatccaaatcggtgcctccccgctgaagacgctcatggggcccacaccttcgtgctggtccaggctctctctgcattgggcgcctcctgagctccgacacatcagaagagag

SEQ ID NO: 22227 - DNA, 122 bp, Homo sapiens
  misc_feature (61)..(62): /note="This region represents a CpG dinucleotide"
  misc_feature (61)..(61): /note="Nucleotide may be methylated to form 5-methylcytosine"
acatatatctctaggacacagacacacacagacagacatacacacacacacacacacacacgcacgcacaagggggaaatcatcagaaaattaaaagcggttaccactttggatgattttta

SEQ ID NO: 22228 - DNA, 122 bp, Homo sapiens
  misc_feature (61)..(62): /note="This region represents a CpG dinucleotide"
  misc_feature (61)..(61): /note="Nucleotide may be methylated to form 5-methylcytosine"
ttgaaaagctcctaaacaagcaccaactcggcaatcttccaccctgattctcttggatggcgaaaagaaaatacttcagagttgctcaccactgggcggcacttggagtgaggtcatgtttg

SEQ ID NO: 22229 - DNA, 122 bp, Homo sapiens
  misc_feature (61)..(62): /note="This region represents a CpG dinucleotide"
  misc_feature (61)..(61): /note="Nucleotide may be methylated to form 5-methylcytosine"
cagcaatcttcagctctcaggctgggttatggctgcccggttccaagtgggacagcaggacgggaacaccattgaggaagaagttcacagcactggcagccccaagaccctggctgcgcagc

SEQ ID NO: 22230 - DNA, 122 bp, Homo sapiens
  misc_feature (61)..(62): /note="This region represents a CpG dinucleotide"
  misc_feature (61)..(61): /note="Nucleotide may be methylated to form 5-methylcytosine"
acatatattcttgccctttaatccagcttctagcaagttatctaagtgattcatcagatacgtgcaaagactagtattcatcacagcactgttcacaaaagtaaaactctgggaacagccta

SEQ ID NO: 22231 - DNA, 122 bp, Homo sapiens
  misc_feature (61)..(62): /note="This region represents a CpG dinucleotide"
  misc_feature (61)..(61): /note="Nucleotide may be methylated to form 5-methylcytosine"
actgcagtcttttccagagtgctagtggagggctgtcaggccggctagaagaattcaaagcgttcagggaacccacaaaagatttcttgcagccttttagctgcctggcaggcagtagaaac

SEQ ID NO: 22232 - DNA, 122 bp, Homo sapiens
  misc_feature (61)..(62): /note="This region represents a CpG dinucleotide"
  misc_feature (61)..(61): /note="Nucleotide may be methylated to form 5-methylcytosine"
cataggggtggaactgaggcagtccagtgccctggcatgccttgatatctgggcacatagcgtggctgctggacacatacttggttttgtgaatgggttgatctctagatgcctcccagata

SEQ ID NO: 22233 - DNA, 122 bp, Homo sapiens
  misc_feature (61)..(62): /note="This region represents a CpG dinucleotide"
  misc_feature (61)..(61): /note="Nucleotide may be methylated to form 5-methylcytosine"
ccttatttagctgtctgcagcaaaggtctctgcaagagctgctttaagcaggcaaaaggacgacatgaagttgttggctgcttgctcagcttacctctgagatagacttgacaaagcggatc

SEQ ID NO: 22234 - DNA, 122 bp, Homo sapiens
  misc_feature (61)..(62): /note="This region represents a CpG dinucleotide"
  misc_feature (61)..(61): /note="Nucleotide may be methylated to form 5-methylcytosine"
cccctctgccactgccacagcagcgattctgtgccagctaccctctgcctggggaagaaacgaagagcctgagggctacagctgggcttacagcacaccacagtcactatgtggagaggagc

SEQ ID NO: 22235 - DNA, 122 bp, Homo sapiens
  misc_feature (61)..(62): /note="This region represents a CpG dinucleotide"
  misc_feature (61)..(61): /note="Nucleotide may be methylated to form 5-methylcytosine"
ggtcctagggtgcatgacgagtatgcagttcaggtcacgtgtgactcacggtgagtctgacgactgccagctggttcagtgagatgagtccactcatcatgcacttggatgtcttgacagtg

SEQ ID NO: 22236 - DNA, 122 bp, Homo sapiens
  misc_feature (61)..(62): /note="This region represents a CpG dinucleotide"
  misc_feature (61)..(61): /note="Nucleotide may be methylated to form 5-methylcytosine"
ggcacccacctctcttgctcttccttaatatattataagggagatggtgataagtggccacgtgagcctctgaggattcagtgtcccctgcaggtccaaccagttatgaccttggtgtggcc

SEQ ID NO: 22237 - DNA, 122 bp, Homo sapiens
  misc_feature (61)..(62): /note="This region represents a CpG dinucleotide"
  misc_feature (61)..(61): /note="Nucleotide may be methylated to form 5-methylcytosine"
gattcaagcttcctcattgctgaacatgtttaggcaggtacaggcatccttaggtgtccacgtatttgggacatgtaagtggagaggcatgaacctgattcatttcctgatccagtgatgct

SEQ ID NO: 22238 - DNA, 122 bp, Homo sapiens
  misc_feature (61)..(62): /note="This region represents a CpG dinucleotide"
  misc_feature (61)..(61): /note="Nucleotide may be methylated to form 5-methylcytosine"
acctcatgatccacccaccttcacctcctaaagtgctggaattacaggcgtgagccaccgcgcccgtccgtgttagtccattttgtgttgctataaagaaatacctgagactgggtaattga

SEQ ID NO: 22239 - DNA, 122 bp, Homo sapiens
  misc_feature (61)..(62): /note="This region represents a CpG dinucleotide"
  misc_feature (61)..(61): /note="Nucleotide may be methylated to form 5-methylcytosine"
gatttcagggacctgatgagacaatatggtggtgaaaacagactgctggattgcaatgggcggaactgggcttagtctctggataggtgtcagttcatttcacacctgtcattgagggaaaa

SEQ ID NO: 22240 - DNA, 122 bp, Homo sapiens
  misc_feature (61)..(62): /note="This region represents a CpG dinucleotide"
  misc_feature (61)..(61): /note="Nucleotide may be methylated to form 5-methylcytosine"
ggtgtgggaaacttgagaggagagccttgcgcagcttcttctgtttacctggtgttggaccgagcatcagcttgctctctaccacactaggaggtagggcggtgggggtttttaactcccca

SEQ ID NO: 22241 - DNA, 122 bp, Homo sapiens
  misc_feature (61)..(62): /note="This region represents a CpG dinucleotide"
  misc_feature (61)..(61): /note="Nucleotide may be methylated to form 5-methylcytosine"
aagtgcactggttaattccctgcaacagtgtacaaaagtgcctttcccccaccacacttgcgtaacatgcaggatttcataaaggctctattagttttaactcactggggttacaattaaca

SEQ ID NO: 22242 - DNA, 122 bp, Homo sapiens
  misc_feature (61)..(62): /note="This region represents a CpG dinucleotide"
  misc_feature (61)..(61): /note="Nucleotide may be methylated to form 5-methylcytosine"
tttcttctttgtttcctatttcagggctatcagctacctttcaaactggtttctgacatgcgtagaggtggactcttctagaacagcagcctcagaattcacttaggaattgggcatgttca

SEQ ID NO: 22243 - DNA, 122 bp, Homo sapiens
  misc_feature (61)..(62): /note="This region represents a CpG dinucleotide"
  misc_feature (61)..(61): /note="Nucleotide may be methylated to form 5-methylcytosine"
ctcttctgcagatggtggcctggaggagaagacccttttccactgcaccgagacgatcagcgggaagaatgagtgggtgtgtattcattatctattgctgtatgaaaaactaccctacagtg

SEQ ID NO: 22244 - DNA, 122 bp, Homo sapiens
  misc_feature (61)..(62): /note="This region represents a CpG dinucleotide"
  misc_feature (61)..(61): /note="Nucleotide may be methylated to form 5-methylcytosine"
agcaggtccccagttggagtcaggaaaccctagctcaggcctggctcagccacaatatgccgcgtgatgctggacctctgatgccgggactcatggtgacttcacccctctgagcctgtgcc

SEQ ID NO: 22245 - DNA, 122 bp, Homo sapiens
  misc_feature (61)..(62): /note="This region represents a CpG dinucleotide"
  misc_feature (61)..(61): /note="Nucleotide may be methylated to form 5-methylcytosine"
acaaaaccaggaagagtgtctggccatcccgggcctgagtttctgcccatgggcagctgccggacaagccctctggtgtgtcagcgggtcaggctgagccagacgtggagatgaggctgaga

SEQ ID NO: 22246 - DNA, 122 bp, Homo sapiens
  misc_feature (61)..(62): /note="This region represents a CpG dinucleotide"
  misc_feature (61)..(61): /note="Nucleotide may be methylated to form 5-methylcytosine"
tccttacagatcgtgttgataatcgagtggaatggacgtggagcaaggcatgttgcacaacgctgagatacgcacactgtgcatttacaggcccataaaccaagaggccaaacagccacagt

SEQ ID NO: 22247 - DNA, 122 bp, Homo sapiens
  misc_feature (61)..(62): /note="This region represents a CpG dinucleotide"
  misc_feature (61)..(61): /note="Nucleotide may be methylated to form 5-methylcytosine"
tcccaattgggggtggagggtggcctgggcaacgggcagcagctcctgcccctggggccccggccacacggaagtggctgttgaagaggaagctaccaggaccctggcaagaaattgtgtcc

SEQ ID NO: 22248 - DNA, 122 bp, Homo sapiens
  misc_feature (61)..(62): /note="This region represents a CpG dinucleotide"
  misc_feature (61)..(61): /note="Nucleotide may be methylated to form 5-methylcytosine"
caaccatgagacaggtccttgatataaaatcaacaaaacgtctgggattaaaactaatctcgagcaatgaaataaaactgcacatagggatcattataccattctacttttgtacgttgcac

SEQ ID NO: 22249 - DNA, 122 bp, Homo sapiens
  misc_feature (61)..(62): /note="This region represents a CpG dinucleotide"
  misc_feature (61)..(61): /note="Nucleotide may be methylated to form 5-methylcytosine"
taaaatacttttgtacagctctgattcgtagcttcctttttcctagtcagcaagcaatttcgcattaggatatgactcaaggacatacggttcattgcaatgatcatcaaatcacatagtgg

SEQ ID NO: 22250 - DNA, 122 bp, Homo sapiens
  misc_feature (61)..(62): /note="This region represents a CpG dinucleotide"
  misc_feature (61)..(61): /note="Nucleotide may be methylated to form 5-methylcytosine"
gctccccttcctttctctctctcccttcccggctcctagactgggtctaggcaggagcttcgccatgatgtcaggagggaaggagatgcctctgggcctcgtaccacagcctcagctctctc

SEQ ID NO: 22251 - DNA, 122 bp, Homo sapiens
  misc_feature (61)..(62): /note="This region represents a CpG dinucleotide"
  misc_feature (61)..(61): /note="Nucleotide may be methylated to form 5-methylcytosine"
atccattctctggtacagtcagaccaagaagctcaggccgtggcagagccatgagccagccgttgaggaaggagctgcaggcacagtagggcttcctggctaggagtgttgctgtttcctcc

SEQ ID NO: 22252 - DNA, 122 bp, Homo sapiens
  misc_feature (61)..(62): /note="This region represents a CpG dinucleotide"
  misc_feature (61)..(61): /note="Nucleotide may be methylated to form 5-methylcytosine"
gtgggaggcatgggaggcaccctccacaaggtgcattagaggatctccagtgggactgaacgccacgtcgcccacagtcataatgaaggaaactcagctggaatttctcccttccttgtcac

SEQ ID NO: 22253 - DNA, 122 bp, Homo sapiens
  misc_feature (61)..(62): /note="This region represents a CpG dinucleotide"
  misc_feature (61)..(61): /note="Nucleotide may be methylated to form 5-methylcytosine"
aaaagccaggaaataatgtgaccttcattgtatggatgaggatcagacatggaaaagtttcggaacttgcacagagtcacccaactagaaagtggtagagctgggattctgactgcaaagct

SEQ ID NO: 22254 - DNA, 122 bp, Homo sapiens
  misc_feature (61)..(62): /note="This region represents a CpG dinucleotide"
  misc_feature (61)..(61): /note="Nucleotide may be methylated to form 5-methylcytosine"
gtgtttcatggggtaatttttatgggattttattcaaaggctgccttcagtagtggcttacgctggcaatcaagcatccaagtgccttgtcaaaggagaggctcttagacatctttagatct

SEQ ID NO: 22255 - DNA, 122 bp, Homo sapiens
  misc_feature (61)..(62): /note="This region represents a CpG dinucleotide"
  misc_feature (61)..(61): /note="Nucleotide may be methylated to form 5-methylcytosine"
tgcctccagttctgaccattcctagcccatcttgtcagctcattgagtcatttgtcttgccgggtcatcttggtttcttactaactcttgtttgcagtatgcttgaccttgatgtgtgtcca

SEQ ID NO: 22256 - DNA, 122 bp, Homo sapiens
  misc_feature (61)..(62): /note="This region represents a CpG dinucleotide"
  misc_feature (61)..(61): /note="Nucleotide may be methylated to form 5-methylcytosine"
tcatgtgccttgggctcaggtggagggagcaaagtcctgcacactggagtggtgtactagcggatcaagtatggacactgactcagactgaggagcagctccactgcactgtgtaccgagga

SEQ ID NO: 22257 - DNA, 122 bp, Homo sapiens
  misc_feature (61)..(62): /note="This region represents a CpG dinucleotide"
  misc_feature (61)..(61): /note="Nucleotide may be methylated to form 5-methylcytosine"
tctaccacgggaggccctggataacttacaaatgtaatatttagaacctagctctgcctgcgtggagagtgcaatttcaggaatagcaacacatgctatgtgagccccagggggacagagac

SEQ ID NO: 22258 - DNA, 122 bp, Homo sapiens
  misc_feature (61)..(62): /note="This region represents a CpG dinucleotide"
  misc_feature (61)..(61): /note="Nucleotide may be methylated to form 5-methylcytosine"
catgagccccgctgccctgcacctgcgaccctcaggctagaccttggactgtctacaacacgagtcaggcccaacccgccctggaaatcatcgtaggaggttccagctcagtgcccagagac

SEQ ID NO: 22259 - DNA, 122 bp, Homo sapiens
  misc_feature (61)..(62): /note="This region represents a CpG dinucleotide"
  misc_feature (61)..(61): /note="Nucleotide may be methylated to form 5-methylcytosine"
gcacacccacaaccctcccaggagcagccgctcccggcccctcccactgcccgccttgcccgggcggtgacctaaaacaccagctccagagacacacgccccaaacacaggccactctgagt

SEQ ID NO: 22260 - DNA, 122 bp, Homo sapiens
  misc_feature (61)..(62): /note="This region represents a CpG dinucleotide"
  misc_feature (61)..(61): /note="Nucleotide may be methylated to form 5-methylcytosine"
gattaagctggtgagtggtgagagacagcagccttgttcaggctgggcactagtggaagacgcaagatgagccatccaggccttcacagatactgagaaaggcagccagagagccaggaaac

SEQ ID NO: 22261 - DNA, 122 bp, Homo sapiens
  misc_feature (61)..(62): /note="This region represents a CpG dinucleotide"
  misc_feature (61)..(61): /note="Nucleotide may be methylated to form 5-methylcytosine"
acttcctggtcatcatgagagtttggccttggcactctgcttcaagctgtaactactgcccgtcatggaggcaaaggcaattcggatataggcaattagtaggctaattagtaggtgaacat

SEQ ID NO: 22262 - DNA, 122 bp, Homo sapiens
  misc_feature (61)..(62): /note="This region represents a CpG dinucleotide"
  misc_feature (61)..(61): /note="Nucleotide may be methylated to form 5-methylcytosine"
cactgtgaaaacttcaacctgctgctcccggtgcgtctgggcatgaacgtgggtggcggccgcgctggggctggcagaaggcagggcagggagagaacaggctgtgttccggcctccctgtg

SEQ ID NO: 22263 - DNA, 122 bp, Homo sapiens
  misc_feature (61)..(62): /note="This region represents a CpG dinucleotide"
  misc_feature (61)..(61): /note="Nucleotide may be methylated to form 5-methylcytosine"
ctagctaggaagtatccaggctggtggccaccctgttgtgtcttctgaagctgtcagcaccggtcgctggaaaggcccgcaggctgggaagagtctttctgagcctctagggctcctgccag

SEQ ID NO: 22264 - DNA, 122 bp, Homo sapiens
  misc_feature (61)..(62): /note="This region represents a CpG dinucleotide"
  misc_feature (61)..(61): /note="Nucleotide may be methylated to form 5-methylcytosine"
gttacccagtgctcctgtatccttttaatatgcttctgttttgagcacttccttatttcccggcaccataagttcaggcttatcgtgtactttccttgcctcaagtcctggtttgagtcatt

SEQ ID NO: 22265 - DNA, 122 bp, Homo sapiens
  misc_feature (61)..(62): /note="This region represents a CpG dinucleotide"
  misc_feature (61)..(61): /note="Nucleotide may be methylated to form 5-methylcytosine"
ctaagtgactcacaggtgtgaatctgcttgataaaggaaggattcatgtcctgagagggacggagtggtgtgatgcagtatttcatcatgctagtcagaatggtgcacaacttaaaactgta

SEQ ID NO: 22266 - DNA, 122 bp, Homo sapiens
  misc_feature (61)..(62): /note="This region represents a CpG dinucleotide"
  misc_feature (61)..(61): /note="Nucleotide may be methylated to form 5-methylcytosine"
ctgtaggaacaccttctcctgtctgctgctgccacagagggtagcaaatcccatgctaggcgtggagaggagacttgggcatgtccctggagggacactgctgcagtcacttcacttacaga

SEQ ID NO: 22267 - DNA, 122 bp, Homo sapiens
  misc_feature (61)..(62): /note="This region represents a CpG dinucleotide"
  misc_feature (61)..(61): /note="Nucleotide may be methylated to form 5-methylcytosine"
cacgttgatcacagaccaggagtgctgtgggcgagactacacagagtcccgagtataagccgtgttaggtcagggagagtgcccacccatgtgatgtctgggctgaggtctggagaaaatgc

SEQ ID NO: 22268 - DNA, 122 bp, Homo sapiens
  misc_feature (61)..(62): /note="This region represents a CpG dinucleotide"
  misc_feature (61)..(61): /note="Nucleotide may be methylated to form 5-methylcytosine"
attccttgtacctgtgcattcccacaaaaatacagacttttatgaatgtcactgagtccccgcctgtgtggaccagccatcaagaggaatgagaactgaagctataaatcagatgacagtgt

SEQ ID NO: 22269 - DNA, 122 bp, Homo sapiens
  misc_feature (61)..(62): /note="This region represents a CpG dinucleotide"
  misc_feature (61)..(61): /note="Nucleotide may be methylated to form 5-methylcytosine"
aaaagataaacttgaaactgttggaggctggtgcagggctggagagggcagtcctctaaccgctggcagaggagcctagagccctggagttcaccacctgcagagttcaacctgcccctccc

SEQ ID NO: 22270 - DNA, 122 bp, Homo sapiens
  misc_feature (61)..(62): /note="This region represents a CpG dinucleotide"
  misc_feature (61)..(61): /note="Nucleotide may be methylated to form 5-methylcytosine"
tgtgaatctatagtaaacttaaaatacacctgccatgagagaaggagagagaaacaagggcgatgatgtttaccataaagaattgctgtaaggattaaacgtgatgacttacaatggaagcc

SEQ ID NO: 22271 - DNA, 122 bp, Homo sapiens
  misc_feature (61)..(62): /note="This region represents a CpG dinucleotide"
  misc_feature (61)..(61): /note="Nucleotide may be methylated to form 5-methylcytosine"
ccttcttatttagtctgagctttcacaattccaggctcttgccagtctcaggatttttctcgtgaatgaaccaggaaggtccaaggtagggtgagcaaggcaagctagccagggataggagc

SEQ ID NO: 22272 - DNA, 122 bp, Homo sapiens
  misc_feature (61)..(62): /note="This region represents a CpG dinucleotide"
  misc_feature (61)..(61): /note="Nucleotide may be methylated to form 5-methylcytosine"
cttcctccagtaatgaatacagtcctggccagcaaggcttgccagagatgctgggcttggcggagagaggaattccatgtcccttccctatgactctgcagctgaaatgttactgggctggt

SEQ ID NO: 22273 - DNA, 122 bp, Homo sapiens
  misc_feature (61)..(62): /note="This region represents a CpG dinucleotide"
  misc_feature (61)..(61): /note="Nucleotide may be methylated to form 5-methylcytosine"
cgtgcactgactatccacaggtggaccttctctatgccctgagcagcaccagccctgtgacggtgacttcatgtctgtctagagaggtccttagagtcagcaccttgagtcatccaggggtg

SEQ ID NO: 22274 - DNA, 122 bp, Homo sapiens
  misc_feature (61)..(62): /note="This region represents a CpG dinucleotide"
  misc_feature (61)..(61): /note="Nucleotide may be methylated to form 5-methylcytosine"
ttggcgctttcctaggcagaagtaagttgtaaaagtggccactgcccatacgctttcaaacgcctgcctggagggtggaagttacctggggagcatgctttggtttgcaaatctaccgtcag

SEQ ID NO: 22275 - DNA, 122 bp, Homo sapiens
  misc_feature (61)..(62): /note="This region represents a CpG dinucleotide"
  misc_feature (61)..(61): /note="Nucleotide may be methylated to form 5-methylcytosine"
acacacactcaccctgtcctgccaccattaggtaaagtttcctgccactccttgcacatccgtcattaccaaagagatattaaactagacaactgtaaaaaaataacaccttcagtggcaaa

SEQ ID NO: 22276 - DNA, 122 bp, Homo sapiens
  misc_feature (61)..(62): /note="This region represents a CpG dinucleotide"
  misc_feature (61)..(61): /note="Nucleotide may be methylated to form 5-methylcytosine"
aatccttaagaagctccagccgcaggcacggaaataaacagcttctccctgccctgtatacgtctccgattttacccaggatggggctgaggaagcaacacagattcccaaacgttactttt

SEQ ID NO: 22277 - DNA, 122 bp, Homo sapiens
  misc_feature (61)..(62): /note="This region represents a CpG dinucleotide"
  misc_feature (61)..(61): /note="Nucleotide may be methylated to form 5-methylcytosine"
caaaaagtgatttagaataatgcaaatttgagtccagaatctagaacacccttccaggcacggaggttttccgtttaaatggccctcgggaaataacactgattttcaaagtcgttttaaaa

SEQ ID NO: 22278 - DNA, 122 bp, Homo sapiens
  misc_feature (61)..(62): /note="This region represents a CpG dinucleotide"
  misc_feature (61)..(61): /note="Nucleotide may be methylated to form 5-methylcytosine"
gcaaggctgcagaggtcagcaagacaggaggtgggagcaagagctgcattttctgggtaccggcatatgtcgggcagaatggtaaatatttgcaggagctcacagccagcctggacacgggg

SEQ ID NO: 22279 - DNA, 122 bp, Homo sapiens
  misc_feature (61)..(62): /note="This region represents a CpG dinucleotide"
  misc_feature (61)..(61): /note="Nucleotide may be methylated to form 5-methylcytosine"
gtagtggcagccaatggggcagaagtcatatcttattaagagcagcaacaagttgaccgccgtggttttaattctgagaactcagcaaatgctacagtttatttttagtaccctcaaaccac

SEQ ID NO: 22280 - DNA, 122 bp, Homo sapiens
  misc_feature (61)..(62): /note="This region represents a CpG dinucleotide"
  misc_feature (61)..(61): /note="Nucleotide may be methylated to form 5-methylcytosine"
ctacacatatgcataaacatgcgcatgtctccctacctcttgcctcatccactttttccacgcttcctcaataggttgcccaagaaaagaattacatcagtgctgagaggaaaatatttgtg

SEQ ID NO: 22281 - DNA, 122 bp, Homo sapiens
  misc_feature (61)..(62): /note="This region represents a CpG dinucleotide"
  misc_feature (61)..(61): /note="Nucleotide may be methylated to form 5-methylcytosine"
gaatgtttagggttggctgatttctgtggcatcagcacctaaaactgttcttgctcactgcgctttaatggctgtcgtcatcagcatcttggcaaagaagacaaatggtctggttgccttag

SEQ ID NO: 22282 - DNA, 122 bp, Homo sapiens
  misc_feature (61)..(62): /note="This region represents a CpG dinucleotide"
  misc_feature (61)..(61): /note="Nucleotide may be methylated to form 5-methylcytosine"
aatgatcagacttgaaccctgtgctcatccccccatcactttgtggaactagatgtcctacgttgcacatggcttgattcatggtttggagttgttttctggttgtttcctgtgtgcaggtt

SEQ ID NO: 22283 - DNA, 122 bp, Homo sapiens
  misc_feature (61)..(62): /note="This region represents a CpG dinucleotide"
  misc_feature (61)..(61): /note="Nucleotide may be methylated to form 5-methylcytosine"
ctcaacacccagggctcagcaaaatccaggcggagcaggtcaggcaagattcacccagggcgctgtggcagaagcagctgtaacccgctccatctccaaaacacccccaagtgcagaccaga

SEQ ID NO: 22284 - DNA, 122 bp, Homo sapiens
  misc_feature (61)..(62): /note="This region represents a CpG dinucleotide"
  misc_feature (61)..(61): /note="Nucleotide may be methylated to form 5-methylcytosine"
gcctcaacaaagccagggcattaaaggacaggcttaaatgctcagcctgtattttagaagcggtttctgccagatgttatttgacagtcatttgcaaaattgcctttagtcttaactattgc

SEQ ID NO: 22285 - DNA, 122 bp, Homo sapiens
  misc_feature (61)..(62): /note="This region represents a CpG dinucleotide"
  misc_feature (61)..(61): /note="Nucleotide may be methylated to form 5-methylcytosine"
ttcaatttgggatatgtgtactgtaagatgtttgtaaggcatttatattgaaaggtcaaacgaagatttagatataacaggcctgaatctcagaagaaaggcatgtgcaagatcaagttgag

SEQ ID NO: 22286 - DNA, 122 bp, Homo sapiens
  misc_feature (61)..(62): /note="This region represents a CpG dinucleotide"
  misc_feature (61)..(61): /note="Nucleotide may be methylated to form 5-methylcytosine"
tgcttttatagggctgacttggtgtagtcaaagtgcttatcaagaggggccaagtgttcacgggccaggctgcacatggacaagtaactcagccgtctctcaagttgcttcacagaaagcca

SEQ ID NO: 22287 - DNA, 122 bp, Homo sapiens
  misc_feature (61)..(62): /note="This region represents a CpG dinucleotide"
  misc_feature (61)..(61): /note="Nucleotide may be methylated to form 5-methylcytosine"
ttaaaacttgctgaattcaggtacatctcgattgctcgtggtaataaaggagacattaggcgtggataacaagaccgcaaatggtgagtaaagcaagacaccaggtatcatttctttcctgt

SEQ ID NO: 22288 - DNA, 122 bp, Homo sapiens
  misc_feature (61)..(62): /note="This region represents a CpG dinucleotide"
  misc_feature (61)..(61): /note="Nucleotide may be methylated to form 5-methylcytosine"
ccccaccaaaattcacatactgaagtcctaacttctagtacctcagaatgtatctttattcgaagacaaggacttcaaaaaggtgattaagatgtggccattagggtgtggtagtccaatct

SEQ ID NO: 22289 - DNA, 122 bp, Homo sapiens
  misc_feature (61)..(62): /note="This region represents a CpG dinucleotide"
  misc_feature (61)..(61): /note="Nucleotide may be methylated to form 5-methylcytosine"
ccatcaatggtaactctatgcataattcaaatattttatttaatatctaaaatgcacacacggacaaggccaaagttaatctttgccacggcaacaaccaggcagggttcagttttactcaa

SEQ ID NO: 22290 - DNA, 122 bp, Homo sapiens
  misc_feature (61)..(62): /note="This region represents a CpG dinucleotide"
  misc_feature (61)..(61): /note="Nucleotide may be methylated to form 5-methylcytosine"
tgagtaggttcttgggtggggacaacaagaccagatgagccagttcaccagtctaggtggcgccagctgatccatcggaatgtacttcctaagaaataccacaaacaccaagcttaggtttt

SEQ ID NO: 22291 - DNA, 122 bp, Homo sapiens
  misc_feature (61)..(62): /note="This region represents a CpG dinucleotide"
  misc_feature (61)..(61): /note="Nucleotide may be methylated to form 5-methylcytosine"
acccttcagtttctccgctccaggcgacgttctcagccttttcttagcctgagaccaccgcgagaacaccaggccttgctcacccccgaggaggctctacattgttaagaaaaccagatagc

SEQ ID NO: 22292 - DNA, 122 bp, Homo sapiens
  misc_feature (61)..(62): /note="This region represents a CpG dinucleotide"
  misc_feature (61)..(61): /note="Nucleotide may be methylated to form 5-methylcytosine"
gggggaaatgacttcatgggcttgctgttgagctgcttccctttgcatctccgggaaaggcgtggttcacccgcagcaggtccggttaaggaagcacgtgtgtgctttcagcatcgctgcgt

SEQ ID NO: 22293 - DNA, 122 bp, Homo sapiens
  misc_feature (61)..(62): /note="This region represents a CpG dinucleotide"
  misc_feature (61)..(61): /note="Nucleotide may be methylated to form 5-methylcytosine"
aggaccctgggagaaggtgagttatccaaaatgtatgggaagatgacctggatgatacatcgtatcatgtatatattccagaaagagtatgaattgtatatttgtgctttaagaagcagagg

SEQ ID NO: 22294 - DNA, 122 bp, Homo sapiens
  misc_feature (61)..(62): /note="This region represents a CpG dinucleotide"
  misc_feature (61)..(61): /note="Nucleotide may be methylated to form 5-methylcytosine"
ctgcttttcagctttttcttaataaactggtctcagaaattggaccacagaagctgctggcggcaatctcttctagtaagtgggtaaagggaagctgagggagaaatggcaagggtcagaga

SEQ ID NO: 22295 - DNA, 122 bp, Homo sapiens
  misc_feature (61)..(62): /note="This region represents a CpG dinucleotide"
  misc_feature (61)..(61): /note="Nucleotide may be methylated to form 5-methylcytosine"
tggggatttataaacaaggagttgggtggggccaggggatggaaaatcacaaagaagaaacgtcaaggattagctgtttctggctacccagacttaatgggattactgctgaaggcaggcca

SEQ ID NO: 22296 - DNA, 122 bp, Homo sapiens
  misc_feature (61)..(62): /note="This region represents a CpG dinucleotide"
  misc_feature (61)..(61): /note="Nucleotide may be methylated to form 5-methylcytosine"
gattaaaacatgggaaaatataagttataaaatttttatactgggtgcagtggctcacatcggtaataccaactacttgggaagctcaggcaggagggtcgcttgagggcaaaaacttgata

SEQ ID NO: 22297 - DNA, 122 bp, Homo sapiens
  misc_feature (61)..(62): /note="This region represents a CpG dinucleotide"
  misc_feature (61)..(61): /note="Nucleotide may be methylated to form 5-methylcytosine"
gggctgctggtgccttgagtcccacagatgattcattaggaaaagccagatataccaaagcggtttactcagagtcaggggtgtagctctggctgcctgtcagctcccttggatactatatt

SEQ ID NO: 22298 - DNA, 122 bp, Homo sapiens
  misc_feature (61)..(62): /note="This region represents a CpG dinucleotide"
  misc_feature (61)..(61): /note="Nucleotide may be methylated to form 5-methylcytosine"
tacaaacagcttgtacatacccttaagcactacaaaagcatccctgtcttatgactaatacgtaaagccattcttgtttaactgaaggcaatctaagggtgccttctctcatggcagtacca

SEQ ID NO: 22299 - DNA, 122 bp, Homo sapiens
  misc_feature (61)..(62): /note="This region represents a CpG dinucleotide"
  misc_feature (61)..(61): /note="Nucleotide may be methylated to form 5-methylcytosine"
acaggcgaagtctgggaactgaatcctcagcctgggatccggaggcactctgggttaatgcgcatgagtcacattcacaggcagctaccatggaaaccagaggccagatgattgacttctga

SEQ ID NO: 22300 - DNA, 122 bp, Homo sapiens
  misc_feature (61)..(62): /note="This region represents a CpG dinucleotide"
  misc_feature (61)..(61): /note="Nucleotide may be methylated to form 5-methylcytosine"
cagcatctctgctttcttcaggcagcctccattcagataccctcatctccctgcaggtcacgacacaacatccagtgggatctcttggatgctgttcaatttggcaaagtatccggaatacc

SEQ ID NO: 22301 - DNA, 122 bp, Homo sapiens
  misc_feature (61)..(62): /note="This region represents a CpG dinucleotide"
  misc_feature (61)..(61): /note="Nucleotide may be methylated to form 5-methylcytosine"
gaacctctattttgcatcatatcatttctgtccataattgtactgaaatagaaaagtgaccgctcttgctcttggtaaaatatagagtggtcagtagccttatgcacctaattcaaaaggtg

SEQ ID NO: 22302 - DNA, 122 bp, Homo sapiens
  misc_feature (61)..(62): /note="This region represents a CpG dinucleotide"
  misc_feature (61)..(61): /note="Nucleotide may be methylated to form 5-methylcytosine"
tggcagactttagcttggtagaagccagccgaatgcaaaattggctgacttatgtggtgtcggtttctttgtcaggagattttcaagtgaaggctgagtaataccaggaaagggatgttaca

SEQ ID NO: 22303 - DNA, 122 bp, Homo sapiens
  misc_feature (61)..(62): /note="This region represents a CpG dinucleotide"
  misc_feature (61)..(61): /note="Nucleotide may be methylated to form 5-methylcytosine"
agccttattgcagatccctggtttctgtgggattatgtaaaacctgtatttctgaaaccccgcctcccgtcttccttccatcttaaagcagggttgaaccttttattaaactgacagccagg

SEQ ID NO: 22304 - DNA, 122 bp, Homo sapiens
  misc_feature (61)..(62): /note="This region represents a CpG dinucleotide"
  misc_feature (61)..(61): /note="Nucleotide may be methylated to form 5-methylcytosine"
aacaactatgtacataagagccaccttgtaggctaagagtttaacgttgtttaaacacagcgtttgaggcaaacagtagcaacagcagcagcaaatgcaccaaactgacgaaaagacccaga

SEQ ID NO: 22305 - DNA, 122 bp, Homo sapiens
  misc_feature (61)..(62): /note="This region represents a CpG dinucleotide"
  misc_feature (61)..(61): /note="Nucleotide may be methylated to form 5-methylcytosine"
gaacagcaggactagcatggtaaacagactgtaaacaaggagtgtaacctcttgcaaaggcgaggagaggagaccaggaagggaggtgtccagtgaggtgaggaaagcaggtcgagacactc

SEQ ID NO: 22306 - DNA, 122 bp, Homo sapiens
  misc_feature (61)..(62): /note="This region represents a CpG dinucleotide"
  misc_feature (61)..(61): /note="Nucleotide may be methylated to form 5-methylcytosine"
tctgcctggagacaggccgacggctctggaaggagggaggcattttaagcggcgggtctgcggtgccagggggagtcacgggatagctagtgtgtctctggctctgttctcaaagcccagga

SEQ ID NO: 22307 - DNA, 122 bp, Homo sapiens
  misc_feature (61)..(62): /note="This region represents a CpG dinucleotide"
  misc_feature (61)..(61): /note="Nucleotide may be methylated to form 5-methylcytosine"
atgtttgatcagcaattttagtagtgccctactgggaggagtttctctgaacatcagatccgccatgtgttgcttggaggtagcttcgagcaattaagtggattatgcttcataataaattt

SEQ ID NO: 22308 - DNA, 122 bp, Homo sapiens
  misc_feature (61)..(62): /note="This region represents a CpG dinucleotide"
  misc_feature (61)..(61): /note="Nucleotide may be methylated to form 5-methylcytosine"
ttgatatgatgatttccagaaccacactactagttggatggccttagtgaagcagttaaccgctccatgccctagctttctggtctgcaaaacggagataaaaataggctagggtcgtggga

SEQ ID NO: 22309 - DNA, 122 bp, Homo sapiens
  misc_feature (61)..(62): /note="This region represents a CpG dinucleotide"
  misc_feature (61)..(61): /note="Nucleotide may be methylated to form 5-methylcytosine"
ggaattttgcatagggcactgctaacttgttgggttgatggcaatctctttgacagacagcgtatttttcttgaatagaggccaggcttgttaatgttttcccttagtaaaacagaaggagg

SEQ ID NO: 22310 - DNA, 122 bp, Homo sapiens
  misc_feature (61)..(62): /note="This region represents a CpG dinucleotide"
  misc_feature (61)..(61): /note="Nucleotide may be methylated to form 5-methylcytosine"
atcagcagcaaaatcttcaacaatttagcctccatcttgtgcaaggggctatccatgtgccgtattctactcaggatagggccttccttgccagcagggaggtgagtgagtcattctgcaaa

SEQ ID NO: 22311 - DNA, 122 bp, Homo sapiens
  misc_feature (61)..(62): /note="This region represents a CpG dinucleotide"
  misc_feature (61)..(61): /note="Nucleotide may be methylated to form 5-methylcytosine"
acgtgaacagcattgtgctaggccccaaggcaatgaacaggatagcaggacagcccttcacgcctcagtgatctctgttgtgagtcagtgtgagcatacccagtggcctctcttacccatgg

SEQ ID NO: 22312 - DNA, 122 bp, Homo sapiens
  misc_feature (61)..(62): /note="This region represents a CpG dinucleotide"
  misc_feature (61)..(61): /note="Nucleotide may be methylated to form 5-methylcytosine"
tggtctagattacacagatgtacctttcagtggaaaagagttataacaacatgggtcagacgtgacagtgaatccaccatcttagcaggaggaactattacatgtgaaacagttcaccagca

SEQ ID NO: 22313 - DNA, 122 bp, Homo sapiens
  misc_feature (61)..(62): /note="This region represents a CpG dinucleotide"
  misc_feature (61)..(61): /note="Nucleotide may be methylated to form 5-methylcytosine"
aagtagaaattcttgtttcttaccatagctgtgaagaagacctaacccttaagaaaggtacgtatattaaataaataccttgttctaaaaactaccaattaaaatacaatgattctgcatta

SEQ ID NO: 22314 - DNA, 122 bp, Homo sapiens
  misc_feature (61)..(62): /note="This region represents a CpG dinucleotide"
  misc_feature (61)..(61): /note="Nucleotide may be methylated to form 5-methylcytosine"
caggagagctggccgcccagcgacgcgcgggaggccgcctggcaggcgctgctgccctcccgcgtgatccccacgtccatcgaagagatcatcgcctctctgcagtccgaggcccagctggc

SEQ ID NO: 22315 - DNA, 122 bp, Homo sapiens
  misc_feature (61)..(62): /note="This region represents a CpG dinucleotide"
  misc_feature (61)..(61): /note="Nucleotide may be methylated to form 5-methylcytosine"
cttcaccgtcttcacagtgttgatttttattctggagcttgatgcatcatggtcacaggtcggctagcactgttccaggcatgacaatgtcacacagtcatgcccattgggcaggaagctgg

SEQ ID NO: 22316 - DNA, 122 bp, Homo sapiens
  misc_feature (61)..(62): /note="This region represents a CpG dinucleotide"
  misc_feature (61)..(61): /note="Nucleotide may be methylated to form 5-methylcytosine"
cagttaaaaaagaaacacacacacacacacacaaaaccaagaggcagcagttgtttatcacgacctcaactcagtaaggcctgagattctttcgaaaaggagctttgcttcccatgacgcag

SEQ ID NO: 22317 - DNA, 122 bp, Homo sapiens
  misc_feature (61)..(62): /note="This region represents a CpG dinucleotide"
  misc_feature (61)..(61): /note="Nucleotide may be methylated to form 5-methylcytosine"
taggtgcccaacctcaaattcataacaaactccttgtctcttcagtgaattcagaagatacgtgaagcactgaaggaatttttctttgtgtacaagttccttaaattacttccctttcctag

SEQ ID NO: 22318 - DNA, 122 bp, Homo sapiens
  misc_feature (61)..(62): /note="This region represents a CpG dinucleotide"
  misc_feature (61)..(61): /note="Nucleotide may be methylated to form 5-methylcytosine"
cgcccgctcgctgtgtgtgtggcagggcccccaaactgttgccaccctaaatcagagccacgctccaccctattgcccctggcctctggaacctgtcaggtcagccccacctgtctgcctgt

SEQ ID NO: 22319 - DNA, 122 bp, Homo sapiens
  misc_feature (61)..(62): /note="This region represents a CpG dinucleotide"
  misc_feature (61)..(61): /note="Nucleotide may be methylated to form 5-methylcytosine"
atccatatatccacctttctaaaactgtccatcatgtcagcactgaatatactactgtatcgttaagtctgaaaacttttccaacaatgactttactgaaaacctaatctgacaaaaattaa

SEQ ID NO: 22320 - DNA, 122 bp, Homo sapiens
  misc_feature (61)..(62): /note="This region represents a CpG dinucleotide"
  misc_feature (61)..(61): /note="Nucleotide may be methylated to form 5-methylcytosine"
agccacagttccatcacctgcgtgatgggacgagagactggatcaggtgttctccacagccggttatgaagtgagtaacctgagttcataaatgagcagttgggcgggctcctcttccaggc

SEQ ID NO: 22321 - DNA, 122 bp, Homo sapiens
  misc_feature (61)..(62): /note="This region represents a CpG dinucleotide"
  misc_feature (61)..(61): /note="Nucleotide may be methylated to form 5-methylcytosine"
accccacactggggtttacacccctaaaagcaggtgtgtcccgtggcaactgagtgggtgcgtgaaaaggggggatcatcaattaccagctggagcaatccgaatcggttaaagtgaatcaa

SEQ ID NO: 22322 - DNA, 122 bp, Homo sapiens
  misc_feature (61)..(62): /note="This region represents a CpG dinucleotide"
  misc_feature (61)..(61): /note="Nucleotide may be methylated to form 5-methylcytosine"
atactggcctaagcaaagaagagatttatataacagaaacagaaaagttcacagggcttccggtgcaactggattcaggaactcaaacaatgtcatcagaaatctgtctatctctatcgctt

SEQ ID NO: 22323 - DNA, 122 bp, Homo sapiens
  misc_feature (61)..(62): /note="This region represents a CpG dinucleotide"
  misc_feature (61)..(61): /note="Nucleotide may be methylated to form 5-methylcytosine"
tgcaggtcagagaagctgagaagtttctgagaagaggaagaaggttgctgctgggacaagcgagtggctctgaaggcacaagcactgccagctcagacaagcagcccggctggccctgccaa

SEQ ID NO: 22324 - DNA, 122 bp, Homo sapiens
  misc_feature (61)..(62): /note="This region represents a CpG dinucleotide"
  misc_feature (61)..(61): /note="Nucleotide may be methylated to form 5-methylcytosine"
taattaatcctttaaaccactcagagctagcaataattcagcataatagttgggtccagccgtttctttcaatgtcgcacacagactttttgttttggctgagatcatcatggtgctgagag

SEQ ID NO: 22325 - DNA, 122 bp, Homo sapiens
  misc_feature (61)..(62): /note="This region represents a CpG dinucleotide"
  misc_feature (61)..(61): /note="Nucleotide may be methylated to form 5-methylcytosine"
gtccatttccctccctgccataaggagagtggatgcttctttcaaccatgccaagaaaggcgagatgatgtccaagagaacaattcatagagattagattagtgctgcagaaaaggcagaat

SEQ ID NO: 22326 - DNA, 122 bp, Homo sapiens
  misc_feature (61)..(62): /note="This region represents a CpG dinucleotide"
  misc_feature (61)..(61): /note="Nucleotide may be methylated to form 5-methylcytosine"
aggtgctctgcaaggtaggcgattgtttattagagcagcctggcccttatatgatctcagcgtatcaataggaacattgtgttgggagggaagagccataaaatgcctcgggagatgctgag

SEQ ID NO: 22327 - DNA, 122 bp, Homo sapiens
  misc_feature (61)..(62): /note="This region represents a CpG dinucleotide"
  misc_feature (61)..(61): /note="Nucleotide may be methylated to form 5-methylcytosine"
aatcaacttgaatgacagtctaggctgcaaggacttcaagccctagtgctgtgctgggctcggaactagtggacttggagagcacatgccccaatgagacatcagccagggcagctaaagga

SEQ ID NO: 22328 - DNA, 122 bp, Homo sapiens
  misc_feature (61)..(62): /note="This region represents a CpG dinucleotide"
  misc_feature (61)..(61): /note="Nucleotide may be methylated to form 5-methylcytosine"
acaactcaacattcccagtgctgttagtagtttaaggtttctccgcaatgccaggacattcgatgccaacatatgtgagtagtttagtgacttcatttctaggcttcatgccaagaatttct

SEQ ID NO: 22329 - DNA, 122 bp, Homo sapiens
  misc_feature (61)..(62): /note="This region represents a CpG dinucleotide"
  misc_feature (61)..(61): /note="Nucleotide may be methylated to form 5-methylcytosine"
ttccaagaaggccagagaactggcttatccatttggattaatccactggtgaatttctttcgggataggccaaaatggatctggactataatctttacatatttagatccttcaaactagac

SEQ ID NO: 22330 - DNA, 122 bp, Homo sapiens
  misc_feature (61)..(62): /note="This region represents a CpG dinucleotide"
  misc_feature (61)..(61): /note="Nucleotide may be methylated to form 5-methylcytosine"
tgtgtctgtagcctccatagaaccacccagaatgccaggcacacaggtggttaataccctcgatggtaacgttgccagctctcagcttgagcacaaagaacacatcaagccttatgctaagt

SEQ ID NO: 22331 - DNA, 122 bp, Homo sapiens
  misc_feature (61)..(62): /note="This region represents a CpG dinucleotide"
  misc_feature (61)..(61): /note="Nucleotide may be methylated to form 5-methylcytosine"
aaccacaaaaaaacccagaggagccctagctgcatctcactcatggcaagaagccaatctcgaaaggctacgtgctgtatgattccaatgataccacagcctggagagggcaatgccaaggc

SEQ ID NO: 22332 - DNA, 122 bp, Homo sapiens
  misc_feature (61)..(62): /note="This region represents a CpG dinucleotide"
  misc_feature (61)..(61): /note="Nucleotide may be methylated to form 5-methylcytosine"
tgtgctgtaagagattcatacaaagtgctgcaattacacagaagacagtgaccttatgtacgatagagatgtgtgtacaaacttccaacacatgatggataagaacacattctcctctctca

SEQ ID NO: 22333 - DNA, 122 bp, Homo sapiens
  misc_feature (61)..(62): /note="This region represents a CpG dinucleotide"
  misc_feature (61)..(61): /note="Nucleotide may be methylated to form 5-methylcytosine"
ttcatacacttcctccttctccctcggcaccaaagtagtacacaaacacaatgtgtattacgcaagatgtggtttggccattcctctccaaaacaacatttcatatgaattttaacaccaaa

SEQ ID NO: 22334 - DNA, 122 bp, Homo sapiens
  misc_feature (61)..(62): /note="This region represents a CpG dinucleotide"
  misc_feature (61)..(61): /note="Nucleotide may be methylated to form 5-methylcytosine"
cctcagagctttgtgaatgtctcctgtttcagatctgatctcttgtatcctagccacactcgtatctcagaaacctgagaatcaaagtccttgctggtatattgatttttatgaattgcaaa

SEQ ID NO: 22335 - DNA, 122 bp, Homo sapiens
  misc_feature (61)..(62): /note="This region represents a CpG dinucleotide"
  misc_feature (61)..(61): /note="Nucleotide may be methylated to form 5-methylcytosine"
aaaccagtgactcagaagcttctggaacacagcccactgtaagctggggcctcctgccttcgatctcaggctcccaatcggaccttgagagctctctgcccctcctgctctgttcccaaagc

SEQ ID NO: 22336 - DNA, 122 bp, Homo sapiens
  misc_feature (61)..(62): /note="This region represents a CpG dinucleotide"
  misc_feature (61)..(61): /note="Nucleotide may be methylated to form 5-methylcytosine"
tgaagtcaagaagaagcaaagaagccagaggtcctatggtataataggaaaagcctcctccgaagtcagcgatttggttgccactaagcattaggttgagcaactttttactcaacctcagc

SEQ ID NO: 22337 - DNA, 122 bp, Homo sapiens
  misc_feature (61)..(62): /note="This region represents a CpG dinucleotide"
  misc_feature (61)..(61): /note="Nucleotide may be methylated to form 5-methylcytosine"
agcctgacagctcctctgtctccacctggcctccctgccaggcctcctcagagttaacagcggcctggcctcacccttggccagcagttgcaagtccaaacaggcttcgcccacattccctg

SEQ ID NO: 22338 - DNA, 122 bp, Homo sapiens
  misc_feature (61)..(62): /note="This region represents a CpG dinucleotide"
  misc_feature (61)..(61): /note="Nucleotide may be methylated to form 5-methylcytosine"
acaaatctgactggaggtcttgacatcctttatagcagtagaccaaatgttagctacatccgccaacactttcaaaagtttttatggaacaaacagagacaaataccaaatgccaagtaacc

SEQ ID NO: 22339 - DNA, 122 bp, Homo sapiens
  misc_feature (61)..(62): /note="This region represents a CpG dinucleotide"
  misc_feature (61)..(61): /note="Nucleotide may be methylated to form 5-methylcytosine"
gaaacagcattgctaccctccaagacttatgcttagaatgaaaaacttttactgtggtgtcgcaacatgaataattttccttcagactttcatgaggccaagaccatgtttacatttaattc

SEQ ID NO: 22340 - DNA, 122 bp, Homo sapiens
  misc_feature (61)..(62): /note="This region represents a CpG dinucleotide"
  misc_feature (61)..(61): /note="Nucleotide may be methylated to form 5-methylcytosine"
tgccccttgacagggtgtcagaatcgattgtactaagtcacgcacctttggcagttcaaccgtgttcctaatagttaaaaccataacccattcgggaggtgtccacaccgtcccttcccatc

SEQ ID NO: 22341 - DNA, 122 bp, Homo sapiens
  misc_feature (61)..(62): /note="This region represents a CpG dinucleotide"
  misc_feature (61)..(61): /note="Nucleotide may be methylated to form 5-methylcytosine"
aaagaatgtttgaggccagatcacctacagaagttcaacacgtttgtcccatatagatgacgttaagctgttctgccttcatgttaccctcagcacatgtccccaggcacagttgctgcatt

SEQ ID NO: 22342 - DNA, 122 bp, Homo sapiens
  misc_feature (61)..(62): /note="This region represents a CpG dinucleotide"
  misc_feature (61)..(61): /note="Nucleotide may be methylated to form 5-methylcytosine"
tctgaaaagagatagcatcaatacagccctgcaactaaaaataccacaaatcagaaacaacgttcttctcttcttgatccactgaagagaggctgtgttctgtgtgctgtctgtttccttaa

SEQ ID NO: 22343 - DNA, 122 bp, Homo sapiens
  misc_feature (61)..(62): /note="This region represents a CpG dinucleotide"
  misc_feature (61)..(61): /note="Nucleotide may be methylated to form 5-methylcytosine"
tagtgtaagaaaacacatcagacggtccaggcactcagacatagtgttggagcttgggcccgttgcttgtgctgcagaggaaggccattggtttgagtaaacttgtggtcaggtaacacttc

SEQ ID NO: 22344 - DNA, 122 bp, Homo sapiens
  misc_feature (61)..(62): /note="This region represents a CpG dinucleotide"
  misc_feature (61)..(61): /note="Nucleotide may be methylated to form 5-methylcytosine"
caggatatgaaatctcttttaagtatgatttgtgtccaactagtataaacatgaaataaacgcctcaagcacaggttaaagagagaggataagactgaataattagacatgacagttttctc

SEQ ID NO: 22345 - DNA, 122 bp, Homo sapiens
  misc_feature (61)..(62): /note="This region represents a CpG dinucleotide"
  misc_feature (61)..(61): /note="Nucleotide may be methylated to form 5-methylcytosine"
tgcaaacgtgcatccatccctaagctgttcaggttgtcagccatactgcttccctatctgcgctgtttagagctgaaacctgtgccatcatggttaatgttttgacagattttattataaac

SEQ ID NO: 22346 - DNA, 122 bp, Homo sapiens
  misc_feature (61)..(62): /note="This region represents a CpG dinucleotide"
  misc_feature (61)..(61): /note="Nucleotide may be methylated to form 5-methylcytosine"
gaacctggaaggttttcacttctgaggtggaagagattgtttctcaaatcttatcaagcacgtcaaacactttggaagtcttcattaggttgccactactttcaaagggcataaaaacataa

SEQ ID NO: 22347 - DNA, 122 bp, Homo sapiens
  misc_feature (61)..(62): /note="This region represents a CpG dinucleotide"
  misc_feature (61)..(61): /note="Nucleotide may be methylated to form 5-methylcytosine"
ctgctgaatgcatgtcctcatccttgtataaagatgagtgcttgaatgagctgggcagagcgacacaaagtgcccggcacaaggtaaaggttttgacaatagaggcagggccttcctcccca

SEQ ID NO: 22348 - DNA, 122 bp, Homo sapiens
  misc_feature (61)..(62): /note="This region represents a CpG dinucleotide"
  misc_feature (61)..(61): /note="Nucleotide may be methylated to form 5-methylcytosine"
aagctctggttaacgtaaccctcaggacagctcaagaaattcttgcactgtgctttcccacgtacatttcagtgtacaggctgtgtacctgtggctgtttatcaggttcatcttctttagca

SEQ ID NO: 22349 - DNA, 122 bp, Homo sapiens
  misc_feature (61)..(62): /note="This region represents a CpG dinucleotide"
  misc_feature (61)..(61): /note="Nucleotide may be methylated to form 5-methylcytosine"
ctctgcttcctgcctgtgtgtctcacacagattcctcttgctggaaccttttgtttccttcggaacagcctcaatctttgaaaagcaactgagccttaactctagtatgatggctcttgagt

SEQ ID NO: 22350 - DNA, 122 bp, Homo sapiens
  misc_feature (61)..(62): /note="This region represents a CpG dinucleotide"
  misc_feature (61)..(61): /note="Nucleotide may be methylated to form 5-methylcytosine"
gaaattacattttactgcagctttatagatagactgacgatacaggttccctaacattgccgtcttctcattctgtctgtgcttcctcctaacccctcgtttttcagggggttgggaggctg

SEQ ID NO: 22351 - DNA, 122 bp, Homo sapiens
  misc_feature (61)..(62): /note="This region represents a CpG dinucleotide"
  misc_feature (61)..(61): /note="Nucleotide may be methylated to form 5-methylcytosine"
ttttacagcatacctgttagtttgaggagtgacaggaaagattctacagagactgccagacgtgttaaatgggttggcaagaataacagagtaagtcactgttgaatccagaagaggaaaag

SEQ ID NO: 22352 - DNA, 122 bp, Homo sapiens
  misc_feature (61)..(62): /note="This region represents a CpG dinucleotide"
  misc_feature (61)..(61): /note="Nucleotide may be methylated to form 5-methylcytosine"
tacctgagtctttccaaacgacaagccaagaagacctgttgaaagtttcctcttaagtttcgtggagagagactcaggtatagaaatatccttactgccacctgacctgaagcagaagaaat

SEQ ID NO: 22353 - DNA, 122 bp, Homo sapiens
  misc_feature (61)..(62): /note="This region represents a CpG dinucleotide"
  misc_feature (61)..(61): /note="Nucleotide may be methylated to form 5-methylcytosine"
ccatcaggtgaccccagagtacacagagtgtggatatcagacacaccccaatgacaatgacgtagaacaccctccaatgtagtacaagaaactgatcatacaatatactcacaaatacattt

SEQ ID NO: 22354 - DNA, 122 bp, Homo sapiens
  misc_feature (61)..(62): /note="This region represents a CpG dinucleotide"
  misc_feature (61)..(61): /note="Nucleotide may be methylated to form 5-methylcytosine"
gtagcaggaggatatgaatgctgtgtgagtcattaatagcccagccatgctgagctcatacgaagtgccatgcagtatggtgagcagtttacccgatcctgatagtcctggaaacaatacta

SEQ ID NO: 22355 - DNA, 122 bp, Homo sapiens
  misc_feature (61)..(62): /note="This region represents a CpG dinucleotide"
  misc_feature (61)..(61): /note="Nucleotide may be methylated to form 5-methylcytosine"
atcaacactttccttggcgtgtccacactgctggctctctggaccctgggcatcatttcccgtcaagccaggctacacctgggtgagcagaacatgggagccaaatttgctctgttccaggt

SEQ ID NO: 22356 - DNA, 122 bp, Homo sapiens
  misc_feature (61)..(62): /note="This region represents a CpG dinucleotide"
  misc_feature (61)..(61): /note="Nucleotide may be methylated to form 5-methylcytosine"
gttaaatggctcagcttgagacaaaagggcacgtaaccccaagtgtcctcacagcaaacgcgcagcaatttcacaccaggacagggacgttttttcacctcacattttctaaatcataaata

SEQ ID NO: 22357 - DNA, 122 bp, Homo sapiens
  misc_feature (61)..(62): /note="This region represents a CpG dinucleotide"
  misc_feature (61)..(61): /note="Nucleotide may be methylated to form 5-methylcytosine"
aacacactccaggagagcattctaaatacccttgactctcccattactgtagccgagttgcgtactgtcagtttgtttgggatattctctactccttgaaggtggggactctgggagatgac

SEQ ID NO: 22358 - DNA, 122 bp, Homo sapiens
  misc_feature (61)..(62): /note="This region represents a CpG dinucleotide"
  misc_feature (61)..(61): /note="Nucleotide may be methylated to form 5-methylcytosine"
agatctccctcacattgcctttgatctcctgatacccatcacactgtcagcttagcgtagcgtaactaaggcaggaagagacccattctaacatcttgcttgtagcagacacttagggttcc

SEQ ID NO: 22359 - DNA, 122 bp, Homo sapiens
  misc_feature (61)..(62): /note="This region represents a CpG dinucleotide"
  misc_feature (61)..(61): /note="Nucleotide may be methylated to form 5-methylcytosine"
ttcaaccctattccagacggccaagatggagaacccacaaaaatgcctgtcagtgtttaacgatccacctgagtaaaggatggttgcaaaaatgaactggttctctctctgcaaactctggg

SEQ ID NO: 22360 - DNA, 122 bp, Homo sapiens
  misc_feature (61)..(62): /note="This region represents a CpG dinucleotide"
  misc_feature (61)..(61): /note="Nucleotide may be methylated to form 5-methylcytosine"
acatcccccatctcagagcagggctctctaaaagcagttcacccagtgaaacaaaaatgacgacactggggaacactcagctcagtttcaaggcaaccaggaaaaataatcacaaattaaga

SEQ ID NO: 22361 - DNA, 122 bp, Homo sapiens
  misc_feature (61)..(62): /note="This region represents a CpG dinucleotide"
  misc_feature (61)..(61): /note="Nucleotide may be methylated to form 5-methylcytosine"
ccctcccagctacaggcatcctaagtcttcccctacttgggactacaggaaggatggtaccgagacagagagtatgtgactcagagcttacacagttcaaggggcaagacaggagccagaca

SEQ ID NO: 22362 - DNA, 122 bp, Homo sapiens
  misc_feature (61)..(62): /note="This region represents a CpG dinucleotide"
  misc_feature (61)..(61): /note="Nucleotide may be methylated to form 5-methylcytosine"
cttgattgataggaccatatatctgggccataatgaaatatttgggtgtcctaggcagggcgccaaaaatctacatgctgtactgactcatttagtagaactgggtaaacacaattgttcaa

SEQ ID NO: 22363 - DNA, 122 bp, Homo sapiens
  misc_feature (61)..(62): /note="This region represents a CpG dinucleotide"
  misc_feature (61)..(61): /note="Nucleotide may be methylated to form 5-methylcytosine"
agctgttctacacactggcctggcgaagttattttcaactcatctcaagccagccatgaacgtaagagagaagtctgtgtgtgcagttccctctgggcagtgagaccagctacagaggccac

SEQ ID NO: 22364 - DNA, 122 bp, Homo sapiens
  misc_feature (61)..(62): /note="This region represents a CpG dinucleotide"
  misc_feature (61)..(61): /note="Nucleotide may be methylated to form 5-methylcytosine"
catttaatgcctgataattaccaggatctgtgttgagtgctggggatgcaggaatgaagacgacaacacattgtgccaacatattgtggagacagacatgtaaataactaaaatttacacaa

SEQ ID NO: 22365 - DNA, 122 bp, Homo sapiens
  misc_feature (61)..(62): /note="This region represents a CpG dinucleotide"
  misc_feature (61)..(61): /note="Nucleotide may be methylated to form 5-methylcytosine"
aatgccttccatttacttttagttggaagaggaaaggctgaatctttcttacaataggggcgggaaatcaacgtgactctaccagttattataccttcgggagggaaagcagaactctttca

SEQ ID NO: 22366 - DNA, 122 bp, Homo sapiens
  misc_feature (61)..(62): /note="This region represents a CpG dinucleotide"
  misc_feature (61)..(61): /note="Nucleotide may be methylated to form 5-methylcytosine"
gagcattagatgaggctatgcagttgactcactggtgtctctttcctcacttataaaatacgaataataaatacatgtgtttctcggactatggagaacaatgtttgcattgttctttggga

SEQ ID NO: 22367 - DNA, 122 bp, Homo sapiens
  misc_feature (61)..(62): /note="This region represents a CpG dinucleotide"
  misc_feature (61)..(61): /note="Nucleotide may be methylated to form 5-methylcytosine"
gaccacagaggaaagcacgtactagacggaaatggaacaaaacaaaacaaaacaaaacagcgggttgagtcagagcctaaaggccttgactcaatgagaggacaactctttccaaacaaaac

SEQ ID NO: 22368 - DNA, 122 bp, Homo sapiens
  misc_feature (61)..(62): /note="This region represents a CpG dinucleotide"
  misc_feature (61)..(61): /note="Nucleotide may be methylated to form 5-methylcytosine"
aacactttggatttatctaggatctttgagctgaataggtctcaagatcttccttcaggacgtgagaaaaatattttaccacctctatgaggcatgcccaacacaccgtctttagctcaaat

SEQ ID NO: 22369 - DNA, 122 bp, Homo sapiens
  misc_feature (61)..(62): /note="This region represents a CpG dinucleotide"
  misc_feature (61)..(61): /note="Nucleotide may be methylated to form 5-methylcytosine"
tcatagctgggactgagccagaagacagcaaggggtggccaacagagggaggtcctgcagcgttgccagcactgcagcatttggcagcctgttaaagttccacatcatatgcatttcctcct

SEQ ID NO: 22370 - DNA, 122 bp, Homo sapiens
  misc_feature (61)..(62): /note="This region represents a CpG dinucleotide"
  misc_feature (61)..(61): /note="Nucleotide may be methylated to form 5-methylcytosine"
actaataacattttacacatgcatagtactttacagcttacaaagttctcattctagctacgacagctgtgtaaccagttgccctagaacttagtggcatcactatgacgacatcactcagg

SEQ ID NO: 22371 - DNA, 122 bp, Homo sapiens
  misc_feature (61)..(62): /note="This region represents a CpG dinucleotide"
  misc_feature (61)..(61): /note="Nucleotide may be methylated to form 5-methylcytosine"
ggacttgctgtacaagggagtcgccgtcctctcttgtgttgaccgagattcctcagcaggcgggggcagagccggggaaaagcctggaatgggaaggggaggctcaggtgcacctgagggag

SEQ ID NO: 22372 - DNA, 122 bp, Homo sapiens
  misc_feature (61)..(62): /note="This region represents a CpG dinucleotide"
  misc_feature (61)..(61): /note="Nucleotide may be methylated to form 5-methylcytosine"
tgtctgttcatggtcagtcccacagcttttgagctggtcccttttcatctcttatacaatcgctatcagcccttcccttttctgtattttgaatccacaacccaaacgccacctctaccggc

SEQ ID NO: 22373 - DNA, 122 bp, Homo sapiens
  misc_feature (61)..(62): /note="This region represents a CpG dinucleotide"
  misc_feature (61)..(61): /note="Nucleotide may be methylated to form 5-methylcytosine"
ggggccccagcaaatgtttccttaacgtgggaccttcagaaggctctttcaggctgggcgcggtggctcacgcctgtaattccagcactttgggaggccgaggtgggcggatcacttgaggt

SEQ ID NO: 22374 - DNA, 122 bp, Homo sapiens
  misc_feature (61)..(62): /note="This region represents a CpG dinucleotide"
  misc_feature (61)..(61): /note="Nucleotide may be methylated to form 5-methylcytosine"
acagcctcagacaaagctgcgccgtgtatcaattaccgagaggctgcgtgctcctctgggcggagggagccggagcgagcggccagggctgctgccccagctgataagggcccgcattgttc

SEQ ID NO: 22375 - DNA, 122 bp, Homo sapiens
  misc_feature (61)..(62): /note="This region represents a CpG dinucleotide"
  misc_feature (61)..(61): /note="Nucleotide may be methylated to form 5-methylcytosine"
ttacagatgaggagttgaagcccagagagaggtgtgccttacccaaggtcacagaaagtacgtcactgtcaggttatgactctgggccagactgcctatctgtggatgtctttgtggtgaag

SEQ ID NO: 22376 - DNA, 122 bp, Homo sapiens
  misc_feature (61)..(62): /note="This region represents a CpG dinucleotide"
  misc_feature (61)..(61): /note="Nucleotide may be methylated to form 5-methylcytosine"
attttatcgaagaacccagtacttgcaggcgaattatgttctttgctacctcctccccaccggctgctgtattacagtactaacctcacggaatgtagtacagaataaatgaaataaagtaa

SEQ ID NO: 22377 - DNA, 122 bp, Homo sapiens
  misc_feature (61)..(62): /note="This region represents a CpG dinucleotide"
  misc_feature (61)..(61): /note="Nucleotide may be methylated to form 5-methylcytosine"
caccccccactctcgcttcccctctcaaacttctcggactcaggtggaattctgctcctgcgctctgccctagggttggggggggagctggttgtggagctggggggaggcggagcctgggc

SEQ ID NO: 22378 - DNA, 122 bp, Homo sapiens
  misc_feature (61)..(62): /note="This region represents a CpG dinucleotide"
  misc_feature (61)..(61): /note="Nucleotide may be methylated to form 5-methylcytosine"
gagacagtgtgtggctgtcctcaggtgtggctggaacccacagtcgattcttttggctgccgtgaggtttctcaggcaggcactttaaaggggactggggtcagcctagggatgccaccttg

SEQ ID NO: 22379 - DNA, 122 bp, Homo sapiens
  misc_feature (61)..(62): /note="This region represents a CpG dinucleotide"
  misc_feature (61)..(61): /note="Nucleotide may be methylated to form 5-methylcytosine"
ttttacgcggtcctccatggtgtttgggtttctcacagtgtggcagtctcaggataataccgtagtacttttcaccaggcagctgtcttctatgagcaaggtctccaagagaaaggaagtgg

SEQ ID NO: 22380 - DNA, 122 bp, Homo sapiens
  misc_feature (61)..(62): /note="This region represents a CpG dinucleotide"
  misc_feature (61)..(61): /note="Nucleotide may be methylated to form 5-methylcytosine"
aactcatctacttattttcatagtttcctgttagtgtaaaacaaatatgactccctcatacgaatatttaaagtgttgtagcaacctggagtgacggcaacacaagaattttgtaggattca

SEQ ID NO: 22381 - DNA, 122 bp, Homo sapiens
  misc_feature (61)..(62): /note="This region represents a CpG dinucleotide"
  misc_feature (61)..(61): /note="Nucleotide may be methylated to form 5-methylcytosine"
cagactgtcctgtgttgggatgtgaatcatctctttacccagagtatgcaccgctgtacacgctatctactcattagtcattgagctcatctgctccttgacagccaatcattatggcttga

SEQ ID NO: 22382 - DNA, 122 bp, Homo sapiens
  misc_feature (61)..(62): /note="This region represents a CpG dinucleotide"
  misc_feature (61)..(61): /note="Nucleotide may be methylated to form 5-methylcytosine"
gaggagaagtggggctaaaattcaatgcgtgctctgccgccagccaaggccctgatgtggcgttgcatcttccggaaagggaaggccttttataaaccacacaaaagtgcaatctgttcgcc

SEQ ID NO: 22383 - DNA, 122 bp, Homo sapiens
  misc_feature (61)..(62): /note="This region represents a CpG dinucleotide"
  misc_feature (61)..(61): /note="Nucleotide may be methylated to form 5-methylcytosine"
tttggagactcagttgcctaatgcagggtcctgtcatctttccagacagtgtgcctgagacgcttactcaaacactctagacacccagtgcttgtggctgctcccagaattccccactgctg

SEQ ID NO: 22384 - DNA, 122 bp, Homo sapiens
  misc_feature (61)..(62): /note="This region represents a CpG dinucleotide"
  misc_feature (61)..(61): /note="Nucleotide may be methylated to form 5-methylcytosine"
gttcgggcaggtgagataatacctaacctgaagcaaattatcggatgcagaggcttagagcgagtgacttgtattctttactgaagaatataagacctgggggcttcacttaaacgccaaag

SEQ ID NO: 22385 - DNA, 122 bp, Homo sapiens
  misc_feature (61)..(62): /note="This region represents a CpG dinucleotide"
  misc_feature (61)..(61): /note="Nucleotide may be methylated to form 5-methylcytosine"
ctaagatgaaaacacctgtgaaccgtggctacataataaaatgtaagtgtttacaaaccacgacaacatacacataatcaaaattcgggacaggaaacaggaaatggagagggagtgcctca

SEQ ID NO: 22386 - DNA, 122 bp, Homo sapiens
  misc_feature (61)..(62): /note="This region represents a CpG dinucleotide"
  misc_feature (61)..(61): /note="Nucleotide may be methylated to form 5-methylcytosine"
ttttcttccttaagttcaggatagtgatataaaatcagctggctggctgcagcttcccctcgggtctgcaaggtggaacacttatcaaggctcaataaggtaccatcacaacaaactgcaat

SEQ ID NO: 22387 - DNA, 122 bp, Homo sapiens
  misc_feature (61)..(62): /note="This region represents a CpG dinucleotide"
  misc_feature (61)..(61): /note="Nucleotide may be methylated to form 5-methylcytosine"
gcattttgttttcattttttgtaaagtggatgtgcgttgaaagcagtctaggaggacatacgctaaaatgctgagtatctctgaatggcagcattgagggtgaggttttcagtttgtacttt

SEQ ID NO: 22388 - DNA, 122 bp, Homo sapiens
  misc_feature (61)..(62): /note="This region represents a CpG dinucleotide"
  misc_feature (61)..(61): /note="Nucleotide may be methylated to form 5-methylcytosine"
cttagaggccatttccaccctctggctccctgcaggccccctaccgggataccccctagacgcacccacacacccactctgagggtcactcagaatggccattgttctgtaggctgggaaag

SEQ ID NO: 22389 - DNA, 122 bp, Homo sapiens
  misc_feature (61)..(62): /note="This region represents a CpG dinucleotide"
  misc_feature (61)..(61): /note="Nucleotide may be methylated to form 5-methylcytosine"
aatgatgtgcacaaaaatacaaatgtggccttgtgttcctggtgcttaacactaggaaaacgctgactggccttggggaaggaagaagacttattaccaactcttaacatcaattgggaata

SEQ ID NO: 22390 - DNA, 122 bp, Homo sapiens
  misc_feature (61)..(62): /note="This region represents a CpG dinucleotide"
  misc_feature (61)..(61): /note="Nucleotide may be methylated to form 5-methylcytosine"
catgctggtgagttgagtgctagtctgagaccagtgtgctcctggtctcctggcctgtggcgtgaccgcagaaggtcacttacagacacaagggcaagtaatttaatgagcatttcctgcct

SEQ ID NO: 22391 - DNA, 122 bp, Homo sapiens
  misc_feature (61)..(62): /note="This region represents a CpG dinucleotide"
  misc_feature (61)..(61): /note="Nucleotide may be methylated to form 5-methylcytosine"
ctgcccattcaggatatgaaggggcagatggtggttggcatgtgttttccctgccagtgccgtcctaaatcagttccagctagtgaccatttgtgccagtggtgccacaggcacggggaaga

SEQ ID NO: 22392 - DNA, 122 bp, Homo sapiens
  misc_feature (61)..(62): /note="This region represents a CpG dinucleotide"
  misc_feature (61)..(61): /note="Nucleotide may be methylated to form 5-methylcytosine"
gccgccgggaacctcgcagagcggcggggtggccctggcgaggcgcggttgttgggggttcgctcgagcctcacgacgcccgcgactggggactcggaacctgggccaggctgggacgaggc

SEQ ID NO: 22393 - DNA, 122 bp, Homo sapiens
  misc_feature (61)..(62): /note="This region represents a CpG dinucleotide"
  misc_feature (61)..(61): /note="Nucleotide may be methylated to form 5-methylcytosine"
ttcataaagtaaatatctttttcattgctctccagcacatgctaagaatttagcttccaccgccttaagtaaacactctgcgataccagtcctaaaaaagtcactgtggcaggggctgtggt

SEQ ID NO: 22394 - DNA, 122 bp, Homo sapiens
  misc_feature (61)..(62): /note="This region represents a CpG dinucleotide"
  misc_feature (61)..(61): /note="Nucleotide may be methylated to form 5-methylcytosine"
gtttatctaaggttctggagtcaggcatacctatatgcaaatctgactgccttaacatggcgtgatctagagcaagttgtaaaactggaagaataatcataacaatacctacttcgtagggc

SEQ ID NO: 22395 - DNA, 122 bp, Homo sapiens
  misc_feature (61)..(62): /note="This region represents a CpG dinucleotide"
  misc_feature (61)..(61): /note="Nucleotide may be methylated to form 5-methylcytosine"
caggacttgcccctatctctgcagaggccggtgtggcctggaggtgctgagcaccttggccgaccaggccccaggtcagaggaatctccccgtgtaccgtgtgactacgccaactttgccca

SEQ ID NO: 22396 - DNA, 122 bp, Homo sapiens
  misc_feature (61)..(62): /note="This region represents a CpG dinucleotide"
  misc_feature (61)..(61): /note="Nucleotide may be methylated to form 5-methylcytosine"
gagccaagactccagctgctcttcttccaccttgggtcctatccaaacagaacctgtgcccggggccccgacaggcctcaaaggtatcgcctccctggaacctgggggtctggcccagtcta

SEQ ID NO: 22397 - DNA, 122 bp, Homo sapiens
  misc_feature (61)..(62): /note="This region represents a CpG dinucleotide"
  misc_feature (61)..(61): /note="Nucleotide may be methylated to form 5-methylcytosine"
agcatcacattgggaatgtagtgaggaaaggagacggtagagaggagagcccagaccaagcgtatgggaggccgacctccaggctaagccctgagcccacaatcaaaaccggatgtaaggag

SEQ ID NO: 22398 - DNA, 122 bp, Homo sapiens
  misc_feature (61)..(62): /note="This region represents a CpG dinucleotide"
  misc_feature (61)..(61): /note="Nucleotide may be methylated to form 5-methylcytosine"
gggaaggccagctctccgtaagaacctgccaggggaagggattctctgggccaaggggaccgagggctcccgagcaagggctggggcgccctgaaagcatacctttccactggcgccaagac

SEQ ID NO: 22399 - DNA, 122 bp, Homo sapiens
  misc_feature (61)..(62): /note="This region represents a CpG dinucleotide"
  misc_feature (61)..(61): /note="Nucleotide may be methylated to form 5-methylcytosine"
ttttgcagagtcactacttgcaaggggagggaagcaagggactcctagcccagagggggacggaagagggggcctccatgtctaggtgatgctgctcagcagcacagcagatcctctgggtc

SEQ ID NO: 22400 - DNA, 122 bp, Homo sapiens
  misc_feature (61)..(62): /note="This region represents a CpG dinucleotide"
  misc_feature (61)..(61): /note="Nucleotide may be methylated to form 5-methylcytosine"
agccgctgtctctgccaggtcagactgggaactgtatggtgtgcagagatgtatcagacacgggcctactgcctgagacactggccatcctgttggacaggaatgacacagaaagcagaaac

SEQ ID NO: 22401 - DNA, 122 bp, Homo sapiens
  misc_feature (61)..(62): /note="This region represents a CpG dinucleotide"
  misc_feature (61)..(61): /note="Nucleotide may be methylated to form 5-methylcytosine"
ggagcccagctaagtaccaagaagcttttccatgagggagcctgtgtttggatgggaaaccggtatctctctgttttgtctccttgtctcagcaaaagctgatggagttcttggtgagggat

SEQ ID NO: 22402 - DNA, 122 bp, Homo sapiens
  misc_feature (61)..(62): /note="This region represents a CpG dinucleotide"
  misc_feature (61)..(61): /note="Nucleotide may be methylated to form 5-methylcytosine"
agaagttgggactatttaaacagattagaatgctaaggttttgtgaggtcacacagagagcgagtgacagagtccagactgaatctggggttactcacctccaaatgcttccctgggtaaaa

SEQ ID NO: 22403 - DNA, 122 bp, Homo sapiens
  misc_feature (61)..(62): /note="This region represents a CpG dinucleotide"
  misc_feature (61)..(61): /note="Nucleotide may be methylated to form 5-methylcytosine"
atgttgtgtgttatcactgaaacaaacacaagccatccagttgtgcacttcagctacgtgcggcttagcgtacttcgataatgcctccagaaagtcagggaaaggaaatacagaggaagctg

SEQ ID NO: 22404 - DNA, 122 bp, Homo sapiens
  misc_feature (61)..(62): /note="This region represents a CpG dinucleotide"
  misc_feature (61)..(61): /note="Nucleotide may be methylated to form 5-methylcytosine"
gttcactttttatcatttttaacaaagagagtaaaagagaaagctttaattgtaggttttcgtggaacttggtaaaaattgaggagcctttgtgtcatgacttgaagaaaatttcaatattt

SEQ ID NO: 22405 - DNA, 122 bp, Homo sapiens
  misc_feature (61)..(62): /note="This region represents a CpG dinucleotide"
  misc_feature (61)..(61): /note="Nucleotide may be methylated to form 5-methylcytosine"
ctggacaagaactgcctggcaactaaaatccacaaggatctactgaaagctacaatttggcgctatggggtcataaaaaggctttagacacttagtatcctggttgcctggaggagtttacc

SEQ ID NO: 22406 - DNA, 122 bp, Homo sapiens
  misc_feature (61)..(62): /note="This region represents a CpG dinucleotide"
  misc_feature (61)..(61): /note="Nucleotide may be methylated to form 5-methylcytosine"
ggaggtggctcccgggaggtgaatggctgagacttcgaagagatttcctcccggaaaggccgagcattgagccatccggggggtggggacagctggactaagaaagggcttagtaggcctga

SEQ ID NO: 22407 - DNA, 122 bp, Homo sapiens
  misc_feature (61)..(62): /note="This region represents a CpG dinucleotide"
  misc_feature (61)..(61): /note="Nucleotide may be methylated to form 5-methylcytosine"
acccgaagcatccgcgaaagcgccccggttttaaaccccaaagagctgctcgcttcctcacgcagcagggaaactctgctcgctttccctgaggttagatttgtgttaaattctactaattt

SEQ ID NO: 22408 - DNA, 122 bp, Homo sapiens
  misc_feature (61)..(62): /note="This region represents a CpG dinucleotide"
  misc_feature (61)..(61): /note="Nucleotide may be methylated to form 5-methylcytosine"
aggtcgtctattatttgttcttacagcacatcctgtaacttttttttgccatagttaccacgattacagttaaaacagttcattgcataactagttccttgaggtttgtttctcctattggg

SEQ ID NO: 22409 - DNA, 122 bp, Homo sapiens
  misc_feature (61)..(62): /note="This region represents a CpG dinucleotide"
  misc_feature (61)..(61): /note="Nucleotide may be methylated to form 5-methylcytosine"
ctgtggcttctctcaggaaatgctaggccacaacacaggaaaaatggtgttttcatatcacggttcgtttactgcagtcagagcaaaaaacgacagcaaaacattctaaaaatgccaagcac

SEQ ID NO: 22410 - DNA, 122 bp, Homo sapiens
  misc_feature (61)..(62): /note="This region represents a CpG dinucleotide"
  misc_feature (61)..(61): /note="Nucleotide may be methylated to form 5-methylcytosine"
aaatgaccagatgaattgtgtttcctgtttcgttttgcagttctcattaaagtgggtatacgcatacacttatctcatgtaaatgtcaaactgtttgttcttgaagtgctgagtcttcaaca

SEQ ID NO: 22411 - DNA, 122 bp, Homo sapiens
  misc_feature (61)..(62): /note="This region represents a CpG dinucleotide"
  misc_feature (61)..(61): /note="Nucleotide may be methylated to form 5-methylcytosine"
tagctaaaaatggttactagctgattccaccgggaattcccattgaagctaagtgactcacggcttatttttagatcatcttgccaatattgccatgtatttaattactagatatattaaaa

SEQ ID NO: 22412 - DNA, 122 bp, Homo sapiens
  misc_feature (61)..(62): /note="This region represents a CpG dinucleotide"
  misc_feature (61)..(61): /note="Nucleotide may be methylated to form 5-methylcytosine"
caaaaattgatgtttatctgggacagaaagaagcaattttggagcctacttctttgcttacgcctcctgatgcatggtgttgtgtattaatctactggtgattactttaagtcagctgtagc

SEQ ID NO: 22413 - DNA, 122 bp, Homo sapiens
  misc_feature (61)..(62): /note="This region represents a CpG dinucleotide"
  misc_feature (61)..(61): /note="Nucleotide may be methylated to form 5-methylcytosine"
tagtggaaatgctctcgtatccagacgtgcaccgtctccagtcagcagctgaaaataactcgttcttgaaaggagaaagccaaccgccccctttctcctgcacaactgactgagggcttgaa

SEQ ID NO: 22414 - DNA, 122 bp, Homo sapiens
  misc_feature (61)..(62): /note="This region represents a CpG dinucleotide"
  misc_feature (61)..(61): /note="Nucleotide may be methylated to form 5-methylcytosine"
cgtctgtgtgatgcaggtatgcttatttcttcatgaaagccgcaggtactggttgcctctcgcagggttaaaactcttggcggctcacaggaggtgatgaagagcaagggcacgggagaatg

SEQ ID NO: 22415 - DNA, 122 bp, Homo sapiens
  misc_feature (61)..(62): /note="This region represents a CpG dinucleotide"
  misc_feature (61)..(61): /note="Nucleotide may be methylated to form 5-methylcytosine"
aaagagtgttacatttcatcagagaattaaaaaaaaaaaagaagaagaagaagtaaaggtcgattgaaaactccaaagtgggaaaagactctcccagcttgcaaccaagaactacttccaga

SEQ ID NO: 22416 - DNA, 122 bp, Homo sapiens
  misc_feature (61)..(62): /note="This region represents a CpG dinucleotide"
  misc_feature (61)..(61): /note="Nucleotide may be methylated to form 5-methylcytosine"
aaaaacctcagacttcctatacaagttaagcagaggaacccggaaaatgtctgaagaaaacgattaccaattttttttgttttttttgttttttggtgaccgggtctcactctgttgcccag

SEQ ID NO: 22417 - DNA, 122 bp, Homo sapiens
  misc_feature (61)..(62): /note="This region represents a CpG dinucleotide"
  misc_feature (61)..(61): /note="Nucleotide may be methylated to form 5-methylcytosine"
attcctgcaactacctctgcaatcaagatacagagctaggctgatgtggttgaccatgcccgtagtcccagcactttgggaggctgaggtaggcagattgcttgagcccaggagtttgagac

SEQ ID NO: 22418 - DNA, 122 bp, Homo sapiens
  misc_feature (61)..(62): /note="This region represents a CpG dinucleotide"
  misc_feature (61)..(61): /note="Nucleotide may be methylated to form 5-methylcytosine"
tgccagttatctgggcatctctttgtacagtcaaattgacacataaaattaaccacctctcgtatggagttgttatggggtgataaacttaattaagtttaccccttgtcaacttggcacat

SEQ ID NO: 22419 - DNA, 122 bp, Homo sapiens
  misc_feature (61)..(62): /note="This region represents a CpG dinucleotide"
  misc_feature (61)..(61): /note="Nucleotide may be methylated to form 5-methylcytosine"
caaataatgagaaaagtgagtgttgaatttcccttgacataacccttttggaaaatgcagcggcagatgcaagaagaatgtgacttatattataatgaaagcaaaaatattttcaaatagat

SEQ ID NO: 22420 - DNA, 122 bp, Homo sapiens
  misc_feature (61)..(62): /note="This region represents a CpG dinucleotide"
  misc_feature (61)..(61): /note="Nucleotide may be methylated to form 5-methylcytosine"
ctagcactgtggctacacctatgtgaataatcaggccaaacctaatgagactgtcagaaacgtttacacctgagtaacttcagcgtgcctatgggctaggtaaagtcaggttaagacctgct

SEQ ID NO: 22421 - DNA, 122 bp, Homo sapiens
  misc_feature (61)..(62): /note="This region represents a CpG dinucleotide"
  misc_feature (61)..(61): /note="Nucleotide may be methylated to form 5-methylcytosine"
tcatgggcaatagcaacagatcccacaatactcaaatacaaaaggctacctgagataatgcggtcaggaatgggtgtaacagtgtatgttaatttaatgtcaaatacataatgtatggagaa

SEQ ID NO: 22422 - DNA, 122 bp, Homo sapiens
  misc_feature (61)..(62): /note="This region represents a CpG dinucleotide"
  misc_feature (61)..(61): /note="Nucleotide may be methylated to form 5-methylcytosine"
acaccttgcactgcttctgggtttactgttgcctcgttttaaagtgggactttctcttgacggaagtgtgttaagaattggaaaattccctatcagtagactagcaccatcttgacagcctt

SEQ ID NO: 22423 - DNA, 122 bp, Homo sapiens
  misc_feature (61)..(62): /note="This region represents a CpG dinucleotide"
  misc_feature (61)..(61): /note="Nucleotide may be methylated to form 5-methylcytosine"
aacaaacatatgctttcattcctgagttcctcatattgtttatttacttgtgtttacctacgttatccatgcacaaaagatttgagccatcttactatcatgacaacacatcctacactgta

SEQ ID NO: 22424 - DNA, 122 bp, Homo sapiens
  misc_feature (61)..(62): /note="This region represents a CpG dinucleotide"
  misc_feature (61)..(61): /note="Nucleotide may be methylated to form 5-methylcytosine"
caagtttctatgtgtttatattttcaactgggagcaagcttcccactgcctttactaacccgtgcccttcctttcccccagcagggaccaggccatgtattaaatgtcacttgggtgctggc

SEQ ID NO: 22425 - DNA, 122 bp, Homo sapiens
  misc_feature (61)..(62): /note="This region represents a CpG dinucleotide"
  misc_feature (61)..(61): /note="Nucleotide may be methylated to form 5-methylcytosine"
ctgggaattggtccagcctccactctagaaaatgtagctgtttttatccttggtctagatcgctgactcatgtgttctgtctctgggctgactggctcctctttctcaaccagtcctgcctg

SEQ ID NO: 22426 - DNA, 122 bp, Homo sapiens
  misc_feature (61)..(62): /note="This region represents a CpG dinucleotide"
  misc_feature (61)..(61): /note="Nucleotide may be methylated to form 5-methylcytosine"
cacatgcgtgaacacgccagttaaaaaaaagtaatagtcttgaaggttgtctgataggcacgtagactggcagttctgctgagtgttttgggtctttgtgttgcatcaaaccagtagaagga

SEQ ID NO: 22427 - DNA, 122 bp, Homo sapiens
  misc_feature (61)..(62): /note="This region represents a CpG dinucleotide"
  misc_feature (61)..(61): /note="Nucleotide may be methylated to form 5-methylcytosine"
gagtctcagccccctccccgtccaggccggggccagcacaggaaatggggctatggggcccgcacagggaaacagacgatccatcacatgggccagttgtgagagtgggggatgagggggtg

SEQ ID NO: 22428 - DNA, 122 bp, Homo sapiens
  misc_feature (61)..(62): /note="This region represents a CpG dinucleotide"
  misc_feature (61)..(61): /note="Nucleotide may be methylated to form 5-methylcytosine"
cttgcccaaggccacatgtttgcatggtggtgattacaccacatggccttttgaaactgacgcttttgttcctgaactctctcctctttttaaatcatcattaccacttctctacccaccac

SEQ ID NO: 22429 - DNA, 122 bp, Homo sapiens
  misc_feature (61)..(62): /note="This region represents a CpG dinucleotide"
  misc_feature (61)..(61): /note="Nucleotide may be methylated to form 5-methylcytosine"
tcaagggctgtgttaggcactggtgatacaacgtcaacatgggagacatgctcctgtcctcgaagaactgacaatccaatgtagatacaaagacccaggcaattatgatacagggcagcttg

SEQ ID NO: 22430 - DNA, 122 bp, Homo sapiens
  misc_feature (61)..(62): /note="This region represents a CpG dinucleotide"
  misc_feature (61)..(61): /note="Nucleotide may be methylated to form 5-methylcytosine"
ctcttttacttcatttactcctctcagttgggtatgagtacaccaacttctaaccagttccgcaaggaacatcacttactatgggaggcctctttctaatcatccagttagtcatttcctct

SEQ ID NO: 22431 - DNA, 122 bp, Homo sapiens
  misc_feature (61)..(62): /note="This region represents a CpG dinucleotide"
  misc_feature (61)..(61): /note="Nucleotide may be methylated to form 5-methylcytosine"
catgaagcaaatatagaaactctgtccctttgcagataggactgcctgttaagtgatggccggtcagacttacttgatgactcagtacagtgagagacaagcattagagctgttagttgtta

SEQ ID NO: 22432 - DNA, 122 bp, Homo sapiens
  misc_feature (61)..(62): /note="This region represents a CpG dinucleotide"
  misc_feature (61)..(61): /note="Nucleotide may be methylated to form 5-methylcytosine"
agccctccagaagttaagaggactttgttaagactcaataattgttgatactttccttgccgggaagtcctagaaggcctcatttgcatagttcaaccctgtgtcaatggagaactaaggag

SEQ ID NO: 22433 - DNA, 122 bp, Homo sapiens
  misc_feature (61)..(62): /note="This region represents a CpG dinucleotide"
  misc_feature (61)..(61): /note="Nucleotide may be methylated to form 5-methylcytosine"
ggtcactttcactttgcctggcaccgaaggaaactcaggctatcaaaaacaacaccagtacgtatttcaaatcatgttgtacacaatggatataaacaatttttgtcaacttaaaaattaaa

SEQ ID NO: 22434 - DNA, 122 bp, Homo sapiens
  misc_feature (61)..(62): /note="This region represents a CpG dinucleotide"
  misc_feature (61)..(61): /note="Nucleotide may be methylated to form 5-methylcytosine"
atggctctagggagggaccaccgatggttaccaggccagccactgtgagaaaaccaggtacgaggtgtattctacctgaagtaccaacgcgactgccccagggttcctgtccttccctccca

SEQ ID NO: 22435 - DNA, 122 bp, Homo sapiens
  misc_feature (61)..(62): /note="This region represents a CpG dinucleotide"
  misc_feature (61)..(61): /note="Nucleotide may be methylated to form 5-methylcytosine"
aaaagatcagaatttagagattacactggagatttcagtcaaaaggctgagaagcaattccgaatttagatattattcacaagcaattttcaaagtcgcgggggtctgcataagccacctcc

SEQ ID NO: 22436 - DNA, 122 bp, Homo sapiens
  misc_feature (61)..(62): /note="This region represents a CpG dinucleotide"
  misc_feature (61)..(61): /note="Nucleotide may be methylated to form 5-methylcytosine"
ttctgcatcatgatattcaaataatgcattttagtcagccccttcctggacatctgagctcgtttggcacagtcgatgatgttctccttcacagttagttcctggttcataactcccacatc

SEQ ID NO: 22437 - DNA, 122 bp, Homo sapiens
  misc_feature (61)..(62): /note="This region represents a CpG dinucleotide"
  misc_feature (61)..(61): /note="Nucleotide may be methylated to form 5-methylcytosine"
agggatgtggccagtccacttggagagcgcttccaggttaacaggcttgatgacctggtccgtggaccgctcgatcctggggagagaggagacgctggagagggtagggcagacccagatgg

SEQ ID NO: 22438 - DNA, 122 bp, Homo sapiens
  misc_feature (61)..(62): /note="This region represents a CpG dinucleotide"
  misc_feature (61)..(61): /note="Nucleotide may be methylated to form 5-methylcytosine"
caagtgcttccaatgagtttccacctggtttccaacctctactctatgtacacagagaaacgcaatttaaatgttgtgcaatttttcctaagatatttcctaacttctttttgccatctaag

SEQ ID NO: 22439 - DNA, 122 bp, Homo sapiens
  misc_feature (61)..(62): /note="This region represents a CpG dinucleotide"
  misc_feature (61)..(61): /note="Nucleotide may be methylated to form 5-methylcytosine"
aggaaggtaatatttgctgttgctctttaaaagttgtctcacttatttccttggtcctggcgtactacccttaagggatggacttacttttttcctgctaaaagacataagattggttgaca

SEQ ID NO: 22440 - DNA, 122 bp, Homo sapiens
  misc_feature (61)..(62): /note="This region represents a CpG dinucleotide"
  misc_feature (61)..(61): /note="Nucleotide may be methylated to form 5-methylcytosine"
ctgcaaattgtgtcagcaccttggagcctccgaatctctcagcaggcagtggcatgtgtgcgtcttcatgggtgcgtgcatgtacatgcagcaagtttcgctgaagattcaagttagtgaag

SEQ ID NO: 22441 - DNA, 122 bp, Homo sapiens
  misc_feature (61)..(62): /note="This region represents a CpG dinucleotide"
  misc_feature (61)..(61): /note="Nucleotide may be methylated to form 5-methylcytosine"
cagtcattgagaggaataataatttccagattgcacaatgtatggacttcattctagcaccgggtgctattgctcatacttgtgactgctatagctaattataatcagtctgcactggatac

SEQ ID NO: 22442 - DNA, 122 bp, Homo sapiens
  misc_feature (61)..(62): /note="This region represents a CpG dinucleotide"
  misc_feature (61)..(61): /note="Nucleotide may be methylated to form 5-methylcytosine"
accatagattgcaacagaattaaggaacgttaaacccaaatgcaatatctggtgtttcaccggattctggtagacaaatcccctgacatctgaatatagattgggcactagatgatgctcag

SEQ ID NO: 22443 - DNA, 122 bp, Homo sapiens
  misc_feature (61)..(62): /note="This region represents a CpG dinucleotide"
  misc_feature (61)..(61): /note="Nucleotide may be methylated to form 5-methylcytosine"
ccgtaggttcaaagagaaaatcaatctactggtcagctgttgaggtttttactaagcacccgttatagaggaagcaaaaggagaaagtggtccctgagttcaggggttgacagcctaggatg

SEQ ID NO: 22444 - DNA, 122 bp, Homo sapiens
  misc_feature (61)..(62): /note="This region represents a CpG dinucleotide"
  misc_feature (61)..(61): /note="Nucleotide may be methylated to form 5-methylcytosine"
ctgggaccgagggagggggcaggcctggactctgctgaacacctaatgagcatcagggagcgccactgcaggacgagcagcagagccaagattagagcccctgctgtcctcactacagccac

SEQ ID NO: 22445 - DNA, 122 bp, Homo sapiens
  misc_feature (61)..(62): /note="This region represents a CpG dinucleotide"
  misc_feature (61)..(61): /note="Nucleotide may be methylated to form 5-methylcytosine"
acgacatagcacgttggtaagacattctcattaaacacccagtgaaccaaaccaagataccgaagagcaagttatcagggaagacaaaacttccaccttctggtgtctgtgggaacaagtcc

SEQ ID NO: 22446 - DNA, 122 bp, Homo sapiens
  misc_feature (61)..(62): /note="This region represents a CpG dinucleotide"
  misc_feature (61)..(61): /note="Nucleotide may be methylated to form 5-methylcytosine"
agcggtcgggaccctcgggcaatgagagcaaggtagagtccatccgagaggacacgtccgcggtttgctgcaaaaagccccctttggctgctgcgtggagggaggctccggagagcgtggaa

SEQ ID NO: 22447 - DNA, 122 bp, Homo sapiens
  misc_feature (61)..(62): /note="This region represents a CpG dinucleotide"
  misc_feature (61)..(61): /note="Nucleotide may be methylated to form 5-methylcytosine"
ggattggggttaaaaaagaaaaaaggaaatgtatctgaatgtaagcagtatcatctgtggcgccatcatccttgctgggaggcagctttgtgaactggttgaaagcacaggctttggagtca

SEQ ID NO: 22448 - DNA, 122 bp, Homo sapiens
  misc_feature (61)..(62): /note="This region represents a CpG dinucleotide"
  misc_feature (61)..(61): /note="Nucleotide may be methylated to form 5-methylcytosine"
taagataacagtctcccaatatcctttttatgaactacatagcactttctccgctgttcccgccttgcagatgggtgttttaaaaagtgccaagggccacaaaaggaaactcccactgactc

SEQ ID NO: 22449 - DNA, 122 bp, Homo sapiens
  misc_feature (61)..(62): /note="This region represents a CpG dinucleotide"
  misc_feature (61)..(61): /note="Nucleotide may be methylated to form 5-methylcytosine"
gttctgaaacggactcagaataaacttgcatttcccacaactttgtcaagtattgacaaacgttgacaacatatataatgcccattatagggcagtatatacttattaaagtgtaaggagca

SEQ ID NO: 22450 - DNA, 122 bp, Homo sapiens
  misc_feature (61)..(62): /note="This region represents a CpG dinucleotide"
  misc_feature (61)..(61): /note="Nucleotide may be methylated to form 5-methylcytosine"
tattaagagacagtcactgattgagttgaaaaaaacagaatatgttatttaccctagcaccgtagaaccactgacagctgagagaaaggtctttttctgttacaatatgttgatctcacaga

SEQ ID NO: 22451 - DNA, 122 bp, Homo sapiens
  misc_feature (61)..(62): /note="This region represents a CpG dinucleotide"
  misc_feature (61)..(61): /note="Nucleotide may be methylated to form 5-methylcytosine"
aagtgttcccagaggaaggtcatacacccattaaactctgctgttttgcctcttagtgaacgtgccttagtccacttgcccaactccaaagatcttaccaggaagctgctgattaccagttt

SEQ ID NO: 22452 - DNA, 122 bp, Homo sapiens
  misc_feature (61)..(62): /note="This region represents a CpG dinucleotide"
  misc_feature (61)..(61): /note="Nucleotide may be methylated to form 5-methylcytosine"
tgaagtgagttgtccacaattaggagcagagtggggattagaaaccagttgtcagtttcccgggtcagggatctttccacacagttccagagaggaagtcctggctccaggcagaggaatga

SEQ ID NO: 22453 - DNA, 122 bp, Homo sapiens
  misc_feature (61)..(62): /note="This region represents a CpG dinucleotide"
  misc_feature (61)..(61): /note="Nucleotide may be methylated to form 5-methylcytosine"
ccagggctggctgtgtgcgactgagcaagtcacttatctctgacgaacaccttcactgggcgtccactttagactgtctggacaatggtttcttatcaggaagggatgatggtcagttattg

SEQ ID NO: 22454 - DNA, 122 bp, Homo sapiens
  misc_feature (61)..(62): /note="This region represents a CpG dinucleotide"
  misc_feature (61)..(61): /note="Nucleotide may be methylated to form 5-methylcytosine"
aaaccagggaggaaccctgaaacgaataggctgtagaggcagaaaggaagtagacactgacgcagggtgtggaggaggacagaatgttcatttggcattcaagccctatcactctggaatca

SEQ ID NO: 22455 - DNA, 122 bp, Homo sapiens
  misc_feature (61)..(62): /note="This region represents a CpG dinucleotide"
  misc_feature (61)..(61): /note="Nucleotide may be methylated to form 5-methylcytosine"
agataagcagtgactggctgacatagcccacattaaggagtgcagattttattctaagtgcggtgagaagcccttcaaggatttttaaacaggagtgacatgatctgatttacttttgagag

SEQ ID NO: 22456 - DNA, 122 bp, Homo sapiens
  misc_feature (61)..(62): /note="This region represents a CpG dinucleotide"
  misc_feature (61)..(61): /note="Nucleotide may be methylated to form 5-methylcytosine"
agcagacaatggctccaagtagacgtctctaggtagatggtgtcttcaggtagatggtatcggaattaaactggagcacgcccagccggcgtcggctgcaaaactgactaatctgttgttgg

SEQ ID NO: 22457 - DNA, 122 bp, Homo sapiens
  misc_feature (61)..(62): /note="This region represents a CpG dinucleotide"
  misc_feature (61)..(61): /note="Nucleotide may be methylated to form 5-methylcytosine"
ttaataagtaaaatgttgatcatggaagatccaggctagattttagattgagtctgtgtacgttggctctgcagtgatggcaaggattacaaaatgatttctgtctatagtagctttgggaa

SEQ ID NO: 22458 - DNA, 122 bp, Homo sapiens
  misc_feature (61)..(62): /note="This region represents a CpG dinucleotide"
  misc_feature (61)..(61): /note="Nucleotide may be methylated to form 5-methylcytosine"
tgtggatgttgcagcacagcctgtggcctgctctgaggcttagcgtagtagagggtcgggcgtccggccaagaagaatcctattaaacgctatggggatgtgtcttctggacaactgggaat

SEQ ID NO: 22459 - DNA, 122 bp, Homo sapiens
  misc_feature (61)..(62): /note="This region represents a CpG dinucleotide"
  misc_feature (61)..(61): /note="Nucleotide may be methylated to form 5-methylcytosine"
atctgtgaaatgggatgatgatacaatacatacctgtcaagccaggcttagatgagatcacgtgtgaagggcactccccaggctggcatcacaggcagatttccatcagagtggagtgctgg

SEQ ID NO: 22460 - DNA, 122 bp, Homo sapiens
  misc_feature (61)..(62): /note="This region represents a CpG dinucleotide"
  misc_feature (61)..(61): /note="Nucleotide may be methylated to form 5-methylcytosine"
gtcagctaaggtaaccatttaatgcctgacaacaagtgagtcaagaacactacaaagaaccggatggacagcacttttatttgatgaatgacctgaactacaaaccgagcagacctcaatat

SEQ ID NO: 22461 - DNA, 122 bp, Homo sapiens
  misc_feature (61)..(62): /note="This region represents a CpG dinucleotide"
  misc_feature (61)..(61): /note="Nucleotide may be methylated to form 5-methylcytosine"
atgaccaatcaccaatagacttttaaagtagtgatgtgatttgccactgctcatgatgcacgttggttatttatgtagtgacttgtgggtggaatagctagcagcaaaataccttatgcaat

SEQ ID NO: 22462 - DNA, 122 bp, Homo sapiens
  misc_feature (61)..(62): /note="This region represents a CpG dinucleotide"
  misc_feature (61)..(61): /note="Nucleotide may be methylated to form 5-methylcytosine"
cagaagtctttatagaggccaaagtcatctccaataatcctgaatgagtcaaagttcatccgctagccactttctcattgggaaagtctgccctggagaaggttaactctcctgtacatttg

SEQ ID NO: 22463 - DNA, 122 bp, Homo sapiens
  misc_feature (61)..(62): /note="This region represents a CpG dinucleotide"
  misc_feature (61)..(61): /note="Nucleotide may be methylated to form 5-methylcytosine"
cgttctcagcgccatgcttggctggtgactggtcatgcaccattggcagggcctggagcacgtgcaaggaacagagttcccggctctgcacactcaacatgtgtgtttcatactgtcacctg

SEQ ID NO: 22464 - DNA, 122 bp, Homo sapiens
  misc_feature (61)..(62): /note="This region represents a CpG dinucleotide"
  misc_feature (61)..(61): /note="Nucleotide may be methylated to form 5-methylcytosine"
cagggcttggtgaggtgactcgcggtcgcgggtgactcgccggcaggacactgcctggaacgcctggagcgcctcccactgcagacgtctgtccgcctccagccgctctcctctgacggtca

SEQ ID NO: 22465 - DNA, 122 bp, Homo sapiens
  misc_feature (61)..(62): /note="This region represents a CpG dinucleotide"
  misc_feature (61)..(61): /note="Nucleotide may be methylated to form 5-methylcytosine"
gaccttcttggcatctttcttataaccacaaattgttctgtccccatatggaagagtgaccgttcccctttagctagtaatggcaccttagcatcttcctcctggcaagggcccctgaggac

SEQ ID NO: 22466 - DNA, 122 bp, Homo sapiens
  misc_feature (61)..(62): /note="This region represents a CpG dinucleotide"
  misc_feature (61)..(61): /note="Nucleotide may be methylated to form 5-methylcytosine"
gttaacccactaggcctcgaattccagccagtagctaaaattattttcctatgagaaaaacgctcttgaagcgttagaggtttcttatctgcagggtctctgggaaggtttccaaatttgtt

SEQ ID NO: 22467 - DNA, 122 bp, Homo sapiens
  misc_feature (61)..(62): /note="This region represents a CpG dinucleotide"
  misc_feature (61)..(61): /note="Nucleotide may be methylated to form 5-methylcytosine"
agcaggcataaactaggaaggtctgaggcaaaccagataacatggtcactctagtcttaacgaagttacctaatcttggtgtcttggtttcttcacattgtggaagggacatgactcacttc

SEQ ID NO: 22468 - DNA, 122 bp, Homo sapiens
  misc_feature (61)..(62): /note="This region represents a CpG dinucleotide"
  misc_feature (61)..(61): /note="Nucleotide may be methylated to form 5-methylcytosine"
agtctttactactgcaccttacaggcttggctaagtcatttccagtctgcaccaaggctccgtttccagcagccccagctggtatttctacatggcaccctgtgtgactgccacctgtggct

SEQ ID NO: 22469 - DNA, 122 bp, Homo sapiens
  misc_feature (61)..(62): /note="This region represents a CpG dinucleotide"
  misc_feature (61)..(61): /note="Nucleotide may be methylated to form 5-methylcytosine"
gaatcccaggactctgtgttttctggttacgctcggcctctctggcttcttcacagctgccgctccctcattctcatcttaactgtggccacacccaaaggaaggatttgtaattctcttct

SEQ ID NO: 22470 - DNA, 122 bp, Homo sapiens
  misc_feature (61)..(62): /note="This region represents a CpG dinucleotide"
  misc_feature (61)..(61): /note="Nucleotide may be methylated to form 5-methylcytosine"
tttcccaggaacctcagtggtttgctgagcagctaggagtgatcacagctaagctcttgccggatctatattaagcagggcttggctggatggggtcaatttatggaacaactatgctgctc

SEQ ID NO: 22471 - DNA, 122 bp, Homo sapiens
  misc_feature (61)..(62): /note="This region represents a CpG dinucleotide"
  misc_feature (61)..(61): /note="Nucleotide may be methylated to form 5-methylcytosine"
cattttcggttggtgaggagcacctattttgtttattactgtttcttccaggaaccctctcgccttcccaccttccctggttccttttatacaccacacttaaaattggaggcataaccttg

SEQ ID NO: 22472 - DNA, 122 bp, Homo sapiens
  misc_feature (61)..(62): /note="This region represents a CpG dinucleotide"
  misc_feature (61)..(61): /note="Nucleotide may be methylated to form 5-methylcytosine"
gaagctcaggaccatcggcttcacgtgcctccgcaatctcgtgaggtgaggaaccacctccgtccccactccatgtcctaggaaaccgagacctgagaggagggggacttgctcaaggtcac

SEQ ID NO: 22473 - DNA, 122 bp, Homo sapiens
  misc_feature (61)..(62): /note="This region represents a CpG dinucleotide"
  misc_feature (61)..(61): /note="Nucleotide may be methylated to form 5-methylcytosine"
gcattccttcacgggagcatcacaggggggcatggcagttttgaaacgcaagaagtctgtcgcctgctatctcaggctgaagctcacctcatgtgaatgattgagccatggagtggaattaa

SEQ ID NO: 22474 - DNA, 122 bp, Homo sapiens
  misc_feature (61)..(62): /note="This region represents a CpG dinucleotide"
  misc_feature (61)..(61): /note="Nucleotide may be methylated to form 5-methylcytosine"
caaactcctggcctgaagcaatcctcacactttggcttcccaaagtgcggggattacaggcgtgattgtcccaaatgtcagcagtgtgacactgcgttaggctactattgacctcctggcaa

SEQ ID NO: 22475 - DNA, 122 bp, Homo sapiens
  misc_feature (61)..(62): /note="This region represents a CpG dinucleotide"
  misc_feature (61)..(61): /note="Nucleotide may be methylated to form 5-methylcytosine"
gaagtttcccttctctgtggcgttaatgcatcttgtcagctgaagagaaggcctgcttggcgggttaccatgaacatttctctttggtgttcctgctgattctgcaggagggaatcaggcaa

SEQ ID NO: 22476 - DNA, 122 bp, Homo sapiens
  misc_feature (61)..(62): /note="This region represents a CpG dinucleotide"
  misc_feature (61)..(61): /note="Nucleotide may be methylated to form 5-methylcytosine"
aactgttaaagtcactcctgtttctgatggcagtgtgagttctcaatctacacaggatgacgtgaaagaaaagatcaagaactactgcttggcagccacacttcttgaacaaggagctccat

SEQ ID NO: 22477 - DNA, 122 bp, Homo sapiens
  misc_feature (61)..(62): /note="This region represents a CpG dinucleotide"
  misc_feature (61)..(61): /note="Nucleotide may be methylated to form 5-methylcytosine"
ttgtgcagtgcttggattgtcatattaaagataaagtatgttaatttaaagtgacaggaacgaaatcattctgaagggagcagggcaaggacatatgcatcatgcgctgaacctttgttcct

SEQ ID NO: 22478 - DNA, 122 bp, Homo sapiens
  misc_feature (61)..(62): /note="This region represents a CpG dinucleotide"
  misc_feature (61)..(61): /note="Nucleotide may be methylated to form 5-methylcytosine"
cagcacagattataggcagggctccatttacataaattatgcaatgtagtcttcatgaggcgctgacctgagactgaagttatgcaaggccactggcattaactttgttgttcattacagcg

SEQ ID NO: 22479 - DNA, 122 bp, Homo sapiens
  misc_feature (61)..(62): /note="This region represents a CpG dinucleotide"
  misc_feature (61)..(61): /note="Nucleotide may be methylated to form 5-methylcytosine"
taatcagcagccacccaccccccattatttacatatgttttattaagcattaactacatgcgcaacatttaaaagtgtggtatgatttaatctttgcaaatatcttatgagatacaagttgt

SEQ ID NO: 22480 - DNA, 122 bp, Homo sapiens
  misc_feature (61)..(62): /note="This region represents a CpG dinucleotide"
  misc_feature (61)..(61): /note="Nucleotide may be methylated to form 5-methylcytosine"
cactcccatggggcctcagtttcctcatctgtagatggggtcagatcattgcctccacttcgcagggccagggcaacggccccaggaggagacacccgaacgcagcacctgctcacaggcgt

SEQ ID NO: 22481 - DNA, 122 bp, Homo sapiens
  misc_feature (61)..(62): /note="This region represents a CpG dinucleotide"
  misc_feature (61)..(61): /note="Nucleotide may be methylated to form 5-methylcytosine"
caccgcaccaagccagctgaggccaagcctgataacaatcagtcaatactgagatcaggccgctgattgcttttctcaacttaatgctgtttgtttaactaacaccagtgagagtccttatt

SEQ ID NO: 22482 - DNA, 122 bp, Homo sapiens
  misc_feature (61)..(62): /note="This region represents a CpG dinucleotide"
  misc_feature (61)..(61): /note="Nucleotide may be methylated to form 5-methylcytosine"
ctaatgaataattaattcattcagctattattttgtgcctattctatggtaggcactctacgagacacatgaggaacaaagatatgtaagacaaggtctctgtattttgaggaactcttatt

SEQ ID NO: 22483 - DNA, 122 bp, Homo sapiens
  misc_feature (61)..(62): /note="This region represents a CpG dinucleotide"
  misc_feature (61)..(61): /note="Nucleotide may be methylated to form 5-methylcytosine"
caagtaatctccctctcataccaactagttatcacaagggttccttacctgttagtggaacgaggattgtgttctcttgttctctatcaatcaaccaacaaaggttatagtctcagcactaa

SEQ ID NO: 22484 - DNA, 122 bp, Homo sapiens
  misc_feature (61)..(62): /note="This region represents a CpG dinucleotide"
  misc_feature (61)..(61): /note="Nucleotide may be methylated to form 5-methylcytosine"
gtagccttgaagtcacacttcctcattttcacaatatccttttggtcacaaggtcagctgcgttcactgtaggatgcattcaatatatggagaagtgaatattactggggaccatcttaaaa

SEQ ID NO: 22485 - DNA, 122 bp, Homo sapiens
  misc_feature (61)..(62): /note="This region represents a CpG dinucleotide"
  misc_feature (61)..(61): /note="Nucleotide may be methylated to form 5-methylcytosine"
ctcttgaggatggtagcagtgcagctgatgtgagtgctttctgccctctggtggtgaccgcgccggagtcaccagccctgccatagccctgatggggcagagggttctgagtacggtggatg

SEQ ID NO: 22486 - DNA, 122 bp, Homo sapiens
  misc_feature (61)..(62): /note="This region represents a CpG dinucleotide"
  misc_feature (61)..(61): /note="Nucleotide may be methylated to form 5-methylcytosine"
acacccggcctggaatgctgtctattgaggaaaggaagaggctgtactggggagtgccagcgttgaagttcaagcaagtgtaaaactctggccttaactgaatcacaagtaggaaacaagtt

SEQ ID NO: 22487 - DNA, 122 bp, Homo sapiens
  misc_feature (61)..(62): /note="This region represents a CpG dinucleotide"
  misc_feature (61)..(61): /note="Nucleotide may be methylated to form 5-methylcytosine"
ctgcattcacctgaaggcttatctggggcccagggattctcttctaaggtagctcatgtacgtgtcttgcaaattatggctgattgttggcaggaggactcaatttctgttcacatgggaat

SEQ ID NO: 22488 - DNA, 122 bp, Homo sapiens
  misc_feature (61)..(62): /note="This region represents a CpG dinucleotide"
  misc_feature (61)..(61): /note="Nucleotide may be methylated to form 5-methylcytosine"
tccttcgattccacctgtaacctgcatctaatcttgagcatgttatttacctatctataacgtcttccttttacaataagactacctgtgtcacctacctacataacaacaagccaaataaa

SEQ ID NO: 22489 - DNA, 122 bp, Homo sapiens
  misc_feature (61)..(62): /note="This region represents a CpG dinucleotide"
  misc_feature (61)..(61): /note="Nucleotide may be methylated to form 5-methylcytosine"
cagtagagtggcacagaagaatggtgagttcattgttattaccctcctagcccgtgagaacgcccaccatcccatgagttcctacatctatgccatgaggagcagttgggtttcagcacagc

SEQ ID NO: 22490 - DNA, 122 bp, Homo sapiens
  misc_feature (61)..(62): /note="This region represents a CpG dinucleotide"
  misc_feature (61)..(61): /note="Nucleotide may be methylated to form 5-methylcytosine"
accctcttactagcaggaaaaaccctgcctagccttcaggcccattcaagtcttaatctacgtcattttgagctcctatttatagctagagacattgttatgtaagttacccatggcatttg

SEQ ID NO: 22491 - DNA, 122 bp, Homo sapiens
  misc_feature (61)..(62): /note="This region represents a CpG dinucleotide"
  misc_feature (61)..(61): /note="Nucleotide may be methylated to form 5-methylcytosine"
tgtgaggaccttgaaatcatcaggaacaagagagaagatccttctgctactgactgaactcgttgtgaggtactcagtgttggctgaggtagaagctgccaccagagactaaagggaaggct

SEQ ID NO: 22492 - DNA, 122 bp, Homo sapiens
  misc_feature (61)..(62): /note="This region represents a CpG dinucleotide"
  misc_feature (61)..(61): /note="Nucleotide may be methylated to form 5-methylcytosine"
attcagaggcattaaattggacacactccccaaagtgcgactaccaccgggttaaagtatcgttccatttaacatttccatcattcctgccaaaacactcttcagaatttgtctacaaactt

SEQ ID NO: 22493 - DNA, 122 bp, Homo sapiens
  misc_feature (61)..(62): /note="This region represents a CpG dinucleotide"
  misc_feature (61)..(61): /note="Nucleotide may be methylated to form 5-methylcytosine"
gagggatggatcagaggctgagtcaggcctgtgtcacacattccattcctgagtagaagacggaatccactcagtacatttcactggagtgtactattaccagtaaaagggggtaaaaaatt

SEQ ID NO: 22494 - DNA, 122 bp, Homo sapiens
  misc_feature (61)..(62): /note="This region represents a CpG dinucleotide"
  misc_feature (61)..(61): /note="Nucleotide may be methylated to form 5-methylcytosine"
attggaatgcaattctacattccagggagttgcattttacaattcctgtcatcgaggcaccgtcatgatgtagttgtcattgctgaggtatgtacagcattggtcacacctgttcataggaa

SEQ ID NO: 22495 - DNA, 122 bp, Homo sapiens
  misc_feature (61)..(62): /note="This region represents a CpG dinucleotide"
  misc_feature (61)..(61): /note="Nucleotide may be methylated to form 5-methylcytosine"
ggcatcctgtaatctcattgcatttacagagcattttcacatgtacttcctccttgaagacgcacctccacctaagaccaagaactagagttctcatgttgcagaggaggaaactgaggttc

SEQ ID NO: 22496 - DNA, 122 bp, Homo sapiens
  misc_feature (61)..(62): /note="This region represents a CpG dinucleotide"
  misc_feature (61)..(61): /note="Nucleotide may be methylated to form 5-methylcytosine"
cctccacttaattacccctttgaaaacaacacacaggagatttacagtaatcaccataatcgcctcataaaaacccgagagtttgaagacggacacgcctcatttctgggaggaattagagg

SEQ ID NO: 22497 - DNA, 122 bp, Homo sapiens
  misc_feature (61)..(62): /note="This region represents a CpG dinucleotide"
  misc_feature (61)..(61): /note="Nucleotide may be methylated to form 5-methylcytosine"
gaccacatcattacatgattgcaacatcctgaacaaactcattctgcagcaccattgccacgtccacagaagcaagcattgcagccctgtgtgtagaccatactgcactgtgatgtcctgag

SEQ ID NO: 22498 - DNA, 122 bp, Homo sapiens
  misc_feature (61)..(62): /note="This region represents a CpG dinucleotide"
  misc_feature (61)..(61): /note="Nucleotide may be methylated to form 5-methylcytosine"
tataaaccatgccctaggcctatcctaactttgcaactacatagaagaaaacaggcttagcgatctggtgattcattcaaggtcaaagatcttgtatgtggcattgcttggtgtcgtcacag

SEQ ID NO: 22499 - DNA, 122 bp, Homo sapiens
  misc_feature (61)..(62): /note="This region represents a CpG dinucleotide"
  misc_feature (61)..(61): /note="Nucleotide may be methylated to form 5-methylcytosine"
agtggtgactcaggcttccccacctcagcttctcagtcaagagatccttcaagccttcagcgccaccctcctctctgccttggatgtgggaggggtgctgtccacctgcggtgctgtcttcc

SEQ ID NO: 22500 - DNA, 122 bp, Homo sapiens
  misc_feature (61)..(62): /note="This region represents a CpG dinucleotide"
  misc_feature (61)..(61): /note="Nucleotide may be methylated to form 5-methylcytosine"
aatgcaaacaaaaggggtgggggttcccagcaggaaggctcacacctgcaggaggccacacgtgagcgtgtgtacatgtgcgtgtgtgcttgtgcagggcgctcccagcctccaggtgatct

SEQ ID NO: 22501 - DNA, 122 bp, Homo sapiens
  misc_feature (61)..(62): /note="This region represents a CpG dinucleotide"
  misc_feature (61)..(61): /note="Nucleotide may be methylated to form 5-methylcytosine"
tccaccacactgccttagagacttcctgtttatattctgtctcatctgttaggctgtaagcgtgacaagatcaggaaacaaaatgttctctttccccatcatccctcctctaccatatgcat

SEQ ID NO: 22502 - DNA, 122 bp, Homo sapiens
  misc_feature (61)..(62): /note="This region represents a CpG dinucleotide"
  misc_feature (61)..(61): /note="Nucleotide may be methylated to form 5-methylcytosine"
tgagccagtgctgctggccaagacgcgctcgtctgagtccatcccacacctgggcgcagacgccggcctgcatgctgcactgcacgccactgtggtccaggacctgggcctgcacgacggca

SEQ ID NO: 22503 - DNA, 122 bp, Homo sapiens
  misc_feature (61)..(62): /note="This region represents a CpG dinucleotide"
  misc_feature (61)..(61): /note="Nucleotide may be methylated to form 5-methylcytosine"
aaagaaatgtaaaccagcctgagttcaattatttacagcctctcacatcaggtgagatggcgcactcctaagttgaagacagtgttccagggcaagtcaatcagatatcaaaagcatgattt

SEQ ID NO: 22504 - DNA, 122 bp, Homo sapiens
  misc_feature (61)..(62): /note="This region represents a CpG dinucleotide"
  misc_feature (61)..(61): /note="Nucleotide may be methylated to form 5-methylcytosine"
tgaacagcctggctatgaggtcatgacaatgacctcacaaacaggaattctcatgttagtcgccctctgggctgaagcctcaccactttaaaggaatctggagctgatgactcaagaaatgt

SEQ ID NO: 22505 - DNA, 122 bp, Homo sapiens
  misc_feature (61)..(62): /note="This region represents a CpG dinucleotide"
  misc_feature (61)..(61): /note="Nucleotide may be methylated to form 5-methylcytosine"
taggagtttgttcttgcaggcattactaaaacagcttcaaaacatcttatggccatgggtcgtgactggcaaggaatgtgccttgctggttttaagctggagttgattttaaaatggtgtca

SEQ ID NO: 22506 - DNA, 122 bp, Homo sapiens
  misc_feature (61)..(62): /note="This region represents a CpG dinucleotide"
  misc_feature (61)..(61): /note="Nucleotide may be methylated to form 5-methylcytosine"
tgtgggtgtggcagacattctggcctgtccagttcgaagacaatgacccatgattgaccacggcactcttgcctcagtctctaagtcactgtctcctggggccccctcattcatgccttttc

SEQ ID NO: 22507 - DNA, 122 bp, Homo sapiens
  misc_feature (61)..(62): /note="This region represents a CpG dinucleotide"
  misc_feature (61)..(61): /note="Nucleotide may be methylated to form 5-methylcytosine"
gaggcctaagatggagacctagagcctacagcacgtttggctggaatgcagaatgtgtaacgaggaaaggcagctctgccaccctgtagaaggccatcctggtcaatgactcagcttctctg

SEQ ID NO: 22508 - DNA, 122 bp, Homo sapiens
  misc_feature (61)..(62): /note="This region represents a CpG dinucleotide"
  misc_feature (61)..(61): /note="Nucleotide may be methylated to form 5-methylcytosine"
actgaaatgacgtgtctgagatcaggcattccccacttggttaccaccctgggctatgatcgctctttggaggttccaaaaatcaagcccagtctcataggaataagaaagtaactaattgt

SEQ ID NO: 22509 - DNA, 122 bp, Homo sapiens
  misc_feature (61)..(62): /note="This region represents a CpG dinucleotide"
  misc_feature (61)..(61): /note="Nucleotide may be methylated to form 5-methylcytosine"
ggcaccattgctcagggctttacatggacttactcatttcattttcactgcagcctagagcgtaagtaagtatttgctttatccccatcttatagatgaggcatttgattctcaaaaaggtt

SEQ ID NO: 22510 - DNA, 122 bp, Homo sapiens
  misc_feature (61)..(62): /note="This region represents a CpG dinucleotide"
  misc_feature (61)..(61): /note="Nucleotide may be methylated to form 5-methylcytosine"
agaaggcacaaaacacagaaatgggggttctcacactacagattaaggagtgtcccaggccgggcacggtggctcacacctgtaatcccagcactttgggaggctgaggcaggtggatcacc

SEQ ID NO: 22511 - DNA, 122 bp, Homo sapiens
  misc_feature (61)..(62): /note="This region represents a CpG dinucleotide"
  misc_feature (61)..(61): /note="Nucleotide may be methylated to form 5-methylcytosine"
gacaaaggtggaacaagtttagcaacaaaataaaagcgtatataatccaaaatataaatacgcatggggccatattgacataactgaacaaataaatgaggaagaacagacaaatttccctc

SEQ ID NO: 22512 - DNA, 122 bp, Homo sapiens
  misc_feature (61)..(62): /note="This region represents a CpG dinucleotide"
  misc_feature (61)..(61): /note="Nucleotide may be methylated to form 5-methylcytosine"
gcattctgttataacaacacaaaacagactaagacaacctatccctgagctttttagctacgtgtgccaatatgttctcttttgcttgtgccagattgagttggattttaaatgaaagaact

SEQ ID NO: 22513 - DNA, 122 bp, Homo sapiens
  misc_feature (61)..(62): /note="This region represents a CpG dinucleotide"
  misc_feature (61)..(61): /note="Nucleotide may be methylated to form 5-methylcytosine"
ctgtgagaaatgtttgagctggctggacacatttcctgaaatcatttctctagtcttttacgaaatgtctgcatttatgctggaatcatagagctgaactatcattgagataaaaattccag

SEQ ID NO: 22514 - DNA, 122 bp, Homo sapiens
  misc_feature (61)..(62): /note="This region represents a CpG dinucleotide"
  misc_feature (61)..(61): /note="Nucleotide may be methylated to form 5-methylcytosine"
gagcacagaaatgtaatccagtttctgtgcccatttctgatttgagttctcacaagtgtacgcatgagtttattgaggctcagctgtacaaaaaatctagtcatcatacccaaatgtcatgg

SEQ ID NO: 22515 - DNA, 122 bp, Homo sapiens
  misc_feature (61)..(62): /note="This region represents a CpG dinucleotide"
  misc_feature (61)..(61): /note="Nucleotide may be methylated to form 5-methylcytosine"
gatggcctgaggaaataaatcagtggagttgggaagcgtggaaccacccacctgctcaggcggaggcaggcaaatcctcataagagtgtcattgggtcaccactatgtgtccaacaacaggg

SEQ ID NO: 22516 - DNA, 122 bp, Homo sapiens
  misc_feature (61)..(62): /note="This region represents a CpG dinucleotide"
  misc_feature (61)..(61): /note="Nucleotide may be methylated to form 5-methylcytosine"
tacagatgtaattattggtagagccacaattcatacctagactcttacctcttagttcagcgttctttctgaatccctatcataatccatatcctgaattgtctctttggtacaggaaccta

SEQ ID NO: 22517 - DNA, 122 bp, Homo sapiens
  misc_feature (61)..(62): /note="This region represents a CpG dinucleotide"
  misc_feature (61)..(61): /note="Nucleotide may be methylated to form 5-methylcytosine"
agaactagtaactgagttcctgaccttggaaagctgagctctaaagggatctagcctcggcgtctagcctgagtagctagctgatatgtctcattcattcatcattcttttccccttaatct

SEQ ID NO: 22518 - DNA, 122 bp, Homo sapiens
  misc_feature (61)..(62): /note="This region represents a CpG dinucleotide"
  misc_feature (61)..(61): /note="Nucleotide may be methylated to form 5-methylcytosine"
ttgcaatcttttgacaaccactactatgatctgattgcccaatgcaggtgcttgtgcagccgccccactgtgccatcaaaagaatcctcagattcttctgactaaaagggacaggcagaaga

SEQ ID NO: 22519 - DNA, 122 bp, Homo sapiens
  misc_feature (61)..(62): /note="This region represents a CpG dinucleotide"
  misc_feature (61)..(61): /note="Nucleotide may be methylated to form 5-methylcytosine"
tcccactgggccagcaggaggcccgcggcgcggcagaggcgccgcacgttgcgctccagccgctgcacctgctcccgcaggacgcgctcctgctcccgcaccaggcccagctggcgccgctg

SEQ ID NO: 22520 - DNA, 122 bp, Homo sapiens
  misc_feature (61)..(62): /note="This region represents a CpG dinucleotide"
  misc_feature (61)..(61): /note="Nucleotide may be methylated to form 5-methylcytosine"
catgtcacccttggctccctatattgtctcttcatctggtttcttagctcctccttttcccgcttccaccgagtttttgtactgctcctgtcactttgcttctcagaagttcagaagcaatt

SEQ ID NO: 22521 - DNA, 122 bp, Homo sapiens
  misc_feature (61)..(62): /note="This region represents a CpG dinucleotide"
  misc_feature (61)..(61): /note="Nucleotide may be methylated to form 5-methylcytosine"
cctcggcctctcaaaatgctgggattacaggcgtgagccactgtgcccagccctagcaaacgttcatcaaatgtctatagcagtggccgggtgctgtggctcacacctctggtcccagcact

SEQ ID NO: 22522 - DNA, 122 bp, Homo sapiens
  misc_feature (61)..(62): /note="This region represents a CpG dinucleotide"
  misc_feature (61)..(61): /note="Nucleotide may be methylated to form 5-methylcytosine"
aggaacagccttcattcccagcttgaattgtttcttaatggaattctacaatgcaaaaaacgtttttgctgaattccgaacggaagcttgttacaacacaatgattagactgacagcttggc

SEQ ID NO: 22523 - DNA, 122 bp, Homo sapiens
  misc_feature (61)..(62): /note="This region represents a CpG dinucleotide"
  misc_feature (61)..(61): /note="Nucleotide may be methylated to form 5-methylcytosine"
gtggtaagcagtagagacactgtagctaataaaaagcaatatctgcaactctttttgtctcgtggggaattgagagacaagaaattacaacagagtgggctagatgctattaaagaataaac

SEQ ID NO: 22524 - DNA, 122 bp, Homo sapiens
  misc_feature (61)..(62): /note="This region represents a CpG dinucleotide"
  misc_feature (61)..(61): /note="Nucleotide may be methylated to form 5-methylcytosine"
ttcggctctgggctggtggtagggggctggtggtaggcgaggtggctgcggtggcccttccgccaggtgtggggtagaccgcttagaagggaaaggggatcctgaagtgcctgaggaagaaa

SEQ ID NO: 22525 - DNA, 122 bp, Homo sapiens
  misc_feature (61)..(62): /note="This region represents a CpG dinucleotide"
  misc_feature (61)..(61): /note="Nucleotide may be methylated to form 5-methylcytosine"
ggaaaaaatgcaggaacagccagatgccgggggattcccggaagtgctgctcatcgcccccgccgcccccacccacaggttccacccaatgctttccacccttaaggcccaaagagctggcc

SEQ ID NO: 22526 - DNA, 122 bp, Homo sapiens
  misc_feature (61)..(62): /note="This region represents a CpG dinucleotide"
  misc_feature (61)..(61): /note="Nucleotide may be methylated to form 5-methylcytosine"
ccaagctgcatggcacttcccagcagttgcaggaaaattaaatgtggttttcctcatcatcgtgaacaacaggggtacaggaaaactgggggataatgtccccattagcctgttttcttagc

SEQ ID NO: 22527 - DNA, 122 bp, Homo sapiens
  misc_feature (61)..(62): /note="This region represents a CpG dinucleotide"
  misc_feature (61)..(61): /note="Nucleotide may be methylated to form 5-methylcytosine"
ataagtgggtgagtaaacggataggtcaggcatcagataggtggggaggcagagaaggggcggaccagaacacagaggtacttggcatgaccatatgagctctcttgagcattatctggcag

SEQ ID NO: 22528 - DNA, 122 bp, Homo sapiens
  misc_feature (61)..(62): /note="This region represents a CpG dinucleotide"
  misc_feature (61)..(61): /note="Nucleotide may be methylated to form 5-methylcytosine"
gatagtgattcctctgatggatctaagcaaagtacagtgaaaatgattcaccattctagacggcattaagaacatttgtgattcatgggaaaaagtaaaaatatcaacattaggctggtgag

SEQ ID NO: 22529 - DNA, 122 bp, Homo sapiens
  misc_feature (61)..(62): /note="This region represents a CpG dinucleotide"
  misc_feature (61)..(61): /note="Nucleotide may be methylated to form 5-methylcytosine"
cttttattaccctcacagcacaagataagtactaatatacaaataaatgagtgtaatcaccgcaccatttagttcatagggccaaccaaaatatgtaagcttttgatcactgccatctgctg

SEQ ID NO: 22530 - DNA, 122 bp, Homo sapiens
  misc_feature (61)..(62): /note="This region represents a CpG dinucleotide"
  misc_feature (61)..(61): /note="Nucleotide may be methylated to form 5-methylcytosine"
tggcagcttaatctcagctgtcgatcctgtggctgtgcttgctgtctttgagaacattcacgtcaatgagcagctctacatcctggtctttggagagtccctgctgaatgatgcagtaacag

SEQ ID NO: 22531 - DNA, 122 bp, Homo sapiens
  misc_feature (61)..(62): /note="This region represents a CpG dinucleotide"
  misc_feature (61)..(61): /note="Nucleotide may be methylated to form 5-methylcytosine"
attgagtcacgccatcatttatttcggtcagcctgattcacccgcgtttatttgacgcgtcgggttataagtcactccacttcattttcttgctgcaagtgtttcgccttcagccacaggaa

SEQ ID NO: 22532 - DNA, 122 bp, Homo sapiens
  misc_feature (61)..(62): /note="This region represents a CpG dinucleotide"
  misc_feature (61)..(61): /note="Nucleotide may be methylated to form 5-methylcytosine"
atcttttcagttcactcttttaagtcactctatctcaattcacttttgctaagtaattcccgactaagaacagctacttggaagttttagatagtgattatgtcaatggcaatcagaggtaa

SEQ ID NO: 22533 - DNA, 122 bp, Homo sapiens
  misc_feature (61)..(62): /note="This region represents a CpG dinucleotide"
  misc_feature (61)..(61): /note="Nucleotide may be methylated to form 5-methylcytosine"
ggccctagcccaggggccgcatagcctggactctgacagcctcctgtaggaattctgatccgcaggtgagggtccatgcagattctctgctgtgtttctgggaggcgaggagttggcaggag

SEQ ID NO: 22534 - DNA, 122 bp, Homo sapiens
  misc_feature (61)..(62): /note="This region represents a CpG dinucleotide"
  misc_feature (61)..(61): /note="Nucleotide may be methylated to form 5-methylcytosine"
ggttagagagcaaggctggtactccaggctaaacagggcctgtctcagcctcagtcctagcgtgcttccagcgggtgttgtcaggatagcaacctagctggagagacagccctcccctctag

SEQ ID NO: 22535 - DNA, 122 bp, Homo sapiens
  misc_feature (61)..(62): /note="This region represents a CpG dinucleotide"
  misc_feature (61)..(61): /note="Nucleotide may be methylated to form 5-methylcytosine"
aagaatataaaagaccaagagcaaagcagagagatggggcagagagacataaggtaaacacgcagaagatagaaagtcaaaaagtgcacatagttggattttaaggaaattctctgcacaac

SEQ ID NO: 22536 - DNA, 122 bp, Homo sapiens
  misc_feature (61)..(62): /note="This region represents a CpG dinucleotide"
  misc_feature (61)..(61): /note="Nucleotide may be methylated to form 5-methylcytosine"
cacaccctcgtgtagtcctctcctctagaatatgcgctgagcctgtgtcgcttgctttaacggacagaatgagtcagaagtgacacagggccagttccagtcctaagccttgagaaggcctg

SEQ ID NO: 22537 - DNA, 122 bp, Homo sapiens
  misc_feature (61)..(62): /note="This region represents a CpG dinucleotide"
  misc_feature (61)..(61): /note="Nucleotide may be methylated to form 5-methylcytosine"
ccaagaccctctacttgaaccttctgtcggtactgtttgtttaagtactgtaagtttccacggttcatgttatcttaggatatcttgtgaaacgaatccttgtggtccctactctgggctaa

SEQ ID NO: 22538 - DNA, 122 bp, Homo sapiens
  misc_feature (61)..(62): /note="This region represents a CpG dinucleotide"
  misc_feature (61)..(61): /note="Nucleotide may be methylated to form 5-methylcytosine"
ggagagctcaagaatttgaccacatctcaaatgactctcagtaaattccagacacaagggcgtgacattttatgcggcacatagcacatttgaactatgctttgttgaatctccatatcaac

SEQ ID NO: 22539 - DNA, 122 bp, Homo sapiens
  misc_feature (61)..(62): /note="This region represents a CpG dinucleotide"
  misc_feature (61)..(61): /note="Nucleotide may be methylated to form 5-methylcytosine"
agattaagatgacattttgaaaagggcacctcattaagcagcctcgtccccactgcagcgcgcactcccgcacagtagccagctgcctgtttatcttatggtgatgaggtgtcacctcccct

SEQ ID NO: 22540 - DNA, 122 bp, Homo sapiens
  misc_feature (61)..(62): /note="This region represents a CpG dinucleotide"
  misc_feature (61)..(61): /note="Nucleotide may be methylated to form 5-methylcytosine"
cctgggagcaaaaggcgacactgcccaagctgagttctcctgcttcctctgcagctgagacggggaccgttcctgagggggaaatctgtgtaaacaggcaaatagacactttcttcccagag

SEQ ID NO: 22541 - DNA, 122 bp, Homo sapiens
  misc_feature (61)..(62): /note="This region represents a CpG dinucleotide"
  misc_feature (61)..(61): /note="Nucleotide may be methylated to form 5-methylcytosine"
agatatcctcaggaaattggaaaagagaggaaagagcttgggaaagagacctcgtgaagtcgtatacagacaccttgggctcatgaatctgatcttaattagcatattttaaaaagacttta

SEQ ID NO: 22542 - DNA, 122 bp, Homo sapiens
  misc_feature (61)..(62): /note="This region represents a CpG dinucleotide"
  misc_feature (61)..(61): /note="Nucleotide may be methylated to form 5-methylcytosine"
acaggctgtgtttttgccagaaagaacgaggagaagcagcagcttgccacaccgggcccacggctccaggtctgcctccaagatggggatgtgtccagatccaccatatgccatggcttaga

SEQ ID NO: 22543 - DNA, 122 bp, Homo sapiens
  misc_feature (61)..(62): /note="This region represents a CpG dinucleotide"
  misc_feature (61)..(61): /note="Nucleotide may be methylated to form 5-methylcytosine"
ggaaatgactaccctgtggtcgaccacagcctctgatgaccaaaacccactttgtgcaggcggtgctgcgaccaggctcgatctgtcatcgagaacattctgctcccaacctggcacggcat

SEQ ID NO: 22544 - DNA, 122 bp, Homo sapiens
  misc_feature (61)..(62): /note="This region represents a CpG dinucleotide"
  misc_feature (61)..(61): /note="Nucleotide may be methylated to form 5-methylcytosine"
tcccttccttgaatgactgaatcacaatactttgatggtgcattcatttgttcgtttgttcgtttgttcattcattcattcattcattcgagacaggatcttgatctgttgcccaggctggg

SEQ ID NO: 22545 - DNA, 122 bp, Homo sapiens
  misc_feature (61)..(62): /note="This region represents a CpG dinucleotide"
  misc_feature (61)..(61): /note="Nucleotide may be methylated to form 5-methylcytosine"
ttacttaaaagactgtttcctgacataagtccatatcacagttgattaacataacacatccgagagaggcagtaaaagtaatgtggaacctttataatgtagtggctaagagcgcagttttc

SEQ ID NO: 22546 - DNA, 122 bp, Homo sapiens
  misc_feature (61)..(62): /note="This region represents a CpG dinucleotide"
  misc_feature (61)..(61): /note="Nucleotide may be methylated to form 5-methylcytosine"
gcttactcaactttcagttcctctaaatatttctagggtatctctctgtccatctctctacggaaaagccctccctttaaaaatcatcttcatactcaacctaactttctactgttactttg

SEQ ID NO: 22547 - DNA, 122 bp, Homo sapiens
  misc_feature (61)..(62): /note="This region represents a CpG dinucleotide"
  misc_feature (61)..(61): /note="Nucleotide may be methylated to form 5-methylcytosine"
ctggcgaaggtacccaagaaatgtgcttccccaaaatgcttacagaaacacagcaggtggcgtgactccaacccacattccccgcagttcagcagacacttcctgggcatctccccggtgcc

SEQ ID NO: 22548 - DNA, 122 bp, Homo sapiens
  misc_feature (61)..(62): /note="This region represents a CpG dinucleotide"
  misc_feature (61)..(61): /note="Nucleotide may be methylated to form 5-methylcytosine"
ggggacaggtgtgggagcttggaatccaacagcaaagccctgcaggtgctcattcctccccgagtctttagaacgcgcctcctcacacttgagcgtcagttataggcttccttgcaaggtaa

SEQ ID NO: 22549 - DNA, 122 bp, Homo sapiens
  misc_feature (61)..(62): /note="This region represents a CpG dinucleotide"
  misc_feature (61)..(61): /note="Nucleotide may be methylated to form 5-methylcytosine"
ccttctttcgaggtcgtggtgttttgtttgctgttttagctgtggtgtgtgtgtaccactcgtacctttcacaggaggacacctcatctgaataccagtcaggacctgagacgcgttgagcc

SEQ ID NO: 22550 - DNA, 122 bp, Homo sapiens
  misc_feature (61)..(62): /note="This region represents a CpG dinucleotide"
  misc_feature (61)..(61): /note="Nucleotide may be methylated to form 5-methylcytosine"
cggagacggctgggacagaagctgcttgtcaggccagcctgggcaccttgggtgtctcgtcggtgcacgatgcattacacggcctttctgagaaggaggtgagctgcccgtggggagggaga

SEQ ID NO: 22551 - DNA, 122 bp, Homo sapiens
  misc_feature (61)..(62): /note="This region represents a CpG dinucleotide"
  misc_feature (61)..(61): /note="Nucleotide may be methylated to form 5-methylcytosine"
atgggacaggaagagtttgcacttggttttttgtgaaagaatgttagaaatacgtgaaaccgttggtagtattttgactatcacctgaaaggtactaaatgttaaactagtaatttgcaatc

SEQ ID NO: 22552 - DNA, 122 bp, Homo sapiens
  misc_feature (61)..(62): /note="This region represents a CpG dinucleotide"
  misc_feature (61)..(61): /note="Nucleotide may be methylated to form 5-methylcytosine"
gagcattgtgtgtaatgacaaaaacagctacaaactacttagctgttcatcaagagagggcggattaaaatgagtcatggccattcctataaaggaacgctttctaaggggaatgctgtggg

SEQ ID NO: 22553 - DNA, 122 bp, Homo sapiens
  misc_feature (61)..(62): /note="This region represents a CpG dinucleotide"
  misc_feature (61)..(61): /note="Nucleotide may be methylated to form 5-methylcytosine"
catccgtgaaatgggaatgacaccagccttgaaggattgaatgacacaccacttgtggcacgcctaggacagtgcttggcattactcagtaagtgctcagtaaaccactgcgtgtgtgacat

SEQ ID NO: 22554 - DNA, 122 bp, Homo sapiens
  misc_feature (61)..(62): /note="This region represents a CpG dinucleotide"
  misc_feature (61)..(61): /note="Nucleotide may be methylated to form 5-methylcytosine"
cacttgcaatttgctaggctggcaactgcacactctggctctagggaggatcactggggacgcaattcctggctggttcctgttttgaaagagagacagtaggacttgatgggtcggggcca

SEQ ID NO: 22555 - DNA, 122 bp, Homo sapiens
  misc_feature (61)..(62): /note="This region represents a CpG dinucleotide"
  misc_feature (61)..(61): /note="Nucleotide may be methylated to form 5-methylcytosine"
ggcaagcagatgtcgcaagccctatttattcagtcttcactataactcttagagttgagacgctaatgttcatgactcctggccttgggatgcccaagggatttctggctcaggctgtaaaa

SEQ ID NO: 22556 - DNA, 122 bp, Homo sapiens
  misc_feature (61)..(62): /note="This region represents a CpG dinucleotide"
  misc_feature (61)..(61): /note="Nucleotide may be methylated to form 5-methylcytosine"
cttcttaattcagtttgactgagattaaaactattattaatctccatttcccaacacacacgcgcaggtaagaagggaaatgtagctaaacaatttaaagtaaccagattatctgccctctg

SEQ ID NO: 22557 - DNA, 122 bp, Homo sapiens
  misc_feature (61)..(62): /note="This region represents a CpG dinucleotide"
  misc_feature (61)..(61): /note="Nucleotide may be methylated to form 5-methylcytosine"
agtgtcacctgtgggctgaaaatgcttgcttcacaacttcctcttttgccagctcaatgccgagaccacaaggctccagggaacaacagaagcacattgtggaaaagtccaggtctctgagt

SEQ ID NO: 22558 - DNA, 122 bp, Homo sapiens
  misc_feature (61)..(62): /note="This region represents a CpG dinucleotide"
  misc_feature (61)..(61): /note="Nucleotide may be methylated to form 5-methylcytosine"
agctggctagactgccagccagctcatgtctctatttccgtgcagctctgtgagagcgagcgtgggcacggctgtttgacctaggttccctttgaaactctcaacaaagcattctgatgttc

SEQ ID NO: 22559 - DNA, 122 bp, Homo sapiens
  misc_feature (61)..(62): /note="This region represents a CpG dinucleotide"
  misc_feature (61)..(61): /note="Nucleotide may be methylated to form 5-methylcytosine"
agttactcataaactataacttctcatgccttctactcttgaacggaaaggtaatacaaacgaaaaagaaacctggccaatgggcaaggtgttatttctggatggttctaaaagcaacaatt

SEQ ID NO: 22560 - DNA, 122 bp, Homo sapiens
  misc_feature (61)..(62): /note="This region represents a CpG dinucleotide"
  misc_feature (61)..(61): /note="Nucleotide may be methylated to form 5-methylcytosine"
tagctgtctgacacccggatcccatgcctaacccaaatgtcactgagccctaaggcacttcgctcctgctggtccaggcagtgtcccctaagattcatcatggcatgttctccatggcctta

SEQ ID NO: 22561 - DNA, 122 bp, Homo sapiens
  misc_feature (61)..(62): /note="This region represents a CpG dinucleotide"
  misc_feature (61)..(61): /note="Nucleotide may be methylated to form 5-methylcytosine"
aaagatgctgacacatcattagttattctcaagcaacactgacggagtgacttccttctacgtctggggactagtctcgatactgaaagtagcacaaagccttcattcactaggaccttctg

SEQ ID NO: 22562 - DNA, 122 bp, Homo sapiens
  misc_feature (61)..(62): /note="This region represents a CpG dinucleotide"
  misc_feature (61)..(61): /note="Nucleotide may be methylated to form 5-methylcytosine"
ctgctacccaagcccctggctggggtgctgaagtgtctgtggtatcttcacctctgctggcgctagctgtgaggcctacatgtctccctcctcccccaccactaggtgccttcccaattccg

SEQ ID NO: 22563 - DNA, 122 bp, Homo sapiens
  misc_feature (61)..(62): /note="This region represents a CpG dinucleotide"
  misc_feature (61)..(61): /note="Nucleotide may be methylated to form 5-methylcytosine"
gaagaaagattacatttccagtccagtttctaatcccaagtatccatgcacccaggatggcgggaaaagggaaaaggcggtaccttaaatgagggaaggacatctcagtcttggccagttct

SEQ ID NO: 22564 - DNA, 122 bp, Homo sapiens
  misc_feature (61)..(62): /note="This region represents a CpG dinucleotide"
  misc_feature (61)..(61): /note="Nucleotide may be methylated to form 5-methylcytosine"
ctgatgaggctggaaaaacatcaggaattaaacttatggccagctcatcagaggagcatgcggcatccacaggatactctggttgttttttctgttgaaaaaaatttccaagaattttttac

SEQ ID NO: 22565 - DNA, 122 bp, Homo sapiens
  misc_feature (61)..(62): /note="This region represents a CpG dinucleotide"
  misc_feature (61)..(61): /note="Nucleotide may be methylated to form 5-methylcytosine"
cctgtgaaatgatcctgccctaggcagctgcgttcccagaggagtgtccacctgggagcacgccacaagcccagaggaacattctgatttcctaatggaaccagatgtcccagtttgggcaa

SEQ ID NO: 22566 - DNA, 122 bp, Homo sapiens
  misc_feature (61)..(62): /note="This region represents a CpG dinucleotide"
  misc_feature (61)..(61): /note="Nucleotide may be methylated to form 5-methylcytosine"
aattgatgttattcttttcctttaccaaaagttaatttaatagaaataaaagacgcccagcgattacctctgtgacagcaagaaatgaggaactgaagaaccccgtgatgttgttcttgaag

SEQ ID NO: 22567 - DNA, 122 bp, Homo sapiens
  misc_feature (61)..(62): /note="This region represents a CpG dinucleotide"
  misc_feature (61)..(61): /note="Nucleotide may be methylated to form 5-methylcytosine"
gctgagaggccatgagtagctgtccttgcccattgggctgtgactctgcctctctggtggcgctgtggtggagagtgcatgctgctgagtttactcagaggcttctcatcctgagagtgcca

SEQ ID NO: 22568 - DNA, 122 bp, Homo sapiens
  misc_feature (61)..(62): /note="This region represents a CpG dinucleotide"
  misc_feature (61)..(61): /note="Nucleotide may be methylated to form 5-methylcytosine"
cttttaatttgactccattcttaggatgatgtgctgcatttctgcaatggcacccactggcgtgcaaaagaaaaactggattttccaggttaagcagaaacatggacgccatactaaactct

SEQ ID NO: 22569 - DNA, 122 bp, Homo sapiens
  misc_feature (61)..(62): /note="This region represents a CpG dinucleotide"
  misc_feature (61)..(61): /note="Nucleotide may be methylated to form 5-methylcytosine"
aaatgacttaaattacaaaaaaagcacagctgtctttaacagctctaggagttcatgcaacgagcctacaatttattgagtaggattagatgcttattgcctatgacactttaaataccatt

SEQ ID NO: 22570 - DNA, 122 bp, Homo sapiens
  misc_feature (61)..(62): /note="This region represents a CpG dinucleotide"
  misc_feature (61)..(61): /note="Nucleotide may be methylated to form 5-methylcytosine"
attgagtgtctttgcatatgcaagacgttatgctcattcaggattggggcatcaatcactcgagcataatagactttgtcagcctcataaattctgggatttaaagagttaaaggatcactg

SEQ ID NO: 22571 - DNA, 122 bp, Homo sapiens
  misc_feature (61)..(62): /note="This region represents a CpG dinucleotide"
  misc_feature (61)..(61): /note="Nucleotide may be methylated to form 5-methylcytosine"
cggcattctcactcgcctgactcagacttgttagttttccagagcaactcatgtggccgccgtctagggagtttattcagagggtgcctctacatgcacagcagccaggtacagaagtcatg

SEQ ID NO: 22572 - DNA, 122 bp, Homo sapiens
  misc_feature (61)..(62): /note="This region represents a CpG dinucleotide"
  misc_feature (61)..(61): /note="Nucleotide may be methylated to form 5-methylcytosine"
gcaataaccacttcacttggttgtgtaatcctccagggcacaataatcattttatgtgatcgtataaaatgctccactgtgaatacaccatttgctcattttccttcctgtcagtggatatt

SEQ ID NO: 22573 - DNA, 122 bp, Homo sapiens
  misc_feature (61)..(62): /note="This region represents a CpG dinucleotide"
  misc_feature (61)..(61): /note="Nucleotide may be methylated to form 5-methylcytosine"
atctgatagtggttacgggctattatgcaagatcatgaatccttttcttttttttcatctcgtcagccagtacagaatgaaggatcatgaatcttaaaactgatttcctgagaagtaataag

SEQ ID NO: 22574 - DNA, 122 bp, Homo sapiens
  misc_feature (61)..(62): /note="This region represents a CpG dinucleotide"
  misc_feature (61)..(61): /note="Nucleotide may be methylated to form 5-methylcytosine"
tgtggagaaaggggaatcctcatacactgttggtgggaatgtgaattagtatagccactacggagaacagtatggaggtttgtcaaaaaactgaaaatagaactaccatgtgctccagcaat

SEQ ID NO: 22575 - DNA, 122 bp, Homo sapiens
  misc_feature (61)..(62): /note="This region represents a CpG dinucleotide"
  misc_feature (61)..(61): /note="Nucleotide may be methylated to form 5-methylcytosine"
tagtttgtgctgcttacaaatcccactctaaactcagctgtcagtgccctcccttggccacgcttcttggagatacaggctttctgcagaggatgccgcatgtcaacaaacacatccccaaa

SEQ ID NO: 22576 - DNA, 122 bp, Homo sapiens
  misc_feature (61)..(62): /note="This region represents a CpG dinucleotide"
  misc_feature (61)..(61): /note="Nucleotide may be methylated to form 5-methylcytosine"
tcctggcctgggtcatgcctgcagggccctcgctagcctatgaaaccccacgggcctgcacgtttcctccacaagctgtgagaggcatcagtatgtcctctccggagtgacaaatgacactc

SEQ ID NO: 22577 - DNA, 122 bp, Homo sapiens
  misc_feature (61)..(62): /note="This region represents a CpG dinucleotide"
  misc_feature (61)..(61): /note="Nucleotide may be methylated to form 5-methylcytosine"
atcccatctttgactcagctctgggtgtctgcttcatgcctgcctttcattctctggtgacgtccagttatcatgtcagaggacactcctctcctcatccctcccttggagatagctacctc

SEQ ID NO: 22578 - DNA, 122 bp, Homo sapiens
  misc_feature (61)..(62): /note="This region represents a CpG dinucleotide"
  misc_feature (61)..(61): /note="Nucleotide may be methylated to form 5-methylcytosine"
agattggaaggggagaagctgactgctgtccctctctttgctgaccagaggcttctagtacgcagcaggcaggagacgagtgaggagaagcttttagatttaaatcatgatggcagtgttaa

SEQ ID NO: 22579 - DNA, 122 bp, Homo sapiens
  misc_feature (61)..(62): /note="This region represents a CpG dinucleotide"
  misc_feature (61)..(61): /note="Nucleotide may be methylated to form 5-methylcytosine"
ggatctgctttgcaagatgaaggacccttcagggagaggcagcccctcccagcagcctcacgaagtgccacagcagagcaggtggagctcagcttgggtcttaacctcccctcaccttctca

SEQ ID NO: 22580 - DNA, 122 bp, Homo sapiens
  misc_feature (61)..(62): /note="This region represents a CpG dinucleotide"
  misc_feature (61)..(61): /note="Nucleotide may be methylated to form 5-methylcytosine"
caatgtaccttggacagtgaaaaacccagggcataagcttgatttgaatggatgcacatacgtgaggcattttgatggtaactttctagagttccaggctgctttcgctcagtaccagtttt

SEQ ID NO: 22581 - DNA, 122 bp, Homo sapiens
  misc_feature (61)..(62): /note="This region represents a CpG dinucleotide"
  misc_feature (61)..(61): /note="Nucleotide may be methylated to form 5-methylcytosine"
ttgggtactatatctactatctgagtgacagattcaacagaagcccaaaccttggcatcacgcaatatactcttgtaacaaacctgcacatgtaccccctgaatctaaaatttaaatttaaa

SEQ ID NO: 22582 - DNA, 122 bp, Homo sapiens
  misc_feature (61)..(62): /note="This region represents a CpG dinucleotide"
  misc_feature (61)..(61): /note="Nucleotide may be methylated to form 5-methylcytosine"
acgacaggctgtgctgcctgctgaacattagcacgctggcacctggttttatgaacctggcgctgaagagtccacctctgaggcaccaggcggggtgcaagccaggccctggacatgggaaa

SEQ ID NO: 22583 - DNA, 122 bp, Homo sapiens
  misc_feature (61)..(62): /note="This region represents a CpG dinucleotide"
  misc_feature (61)..(61): /note="Nucleotide may be methylated to form 5-methylcytosine"
attgaggaagcttggtgctgtcctgctcatattataaatgctggccatagaatggaataccgtatatggagatgaaagacagtgagtgactcacctaaggtcacatgcttagttaaaaacag

SEQ ID NO: 22584 - DNA, 122 bp, Homo sapiens
  misc_feature (61)..(62): /note="This region represents a CpG dinucleotide"
  misc_feature (61)..(61): /note="Nucleotide may be methylated to form 5-methylcytosine"
tccctcgtccattgcatcactgcttacggagagcaacctacagaccagctcctgttagctcgtggtcctcaaggactcagaaaccaggctcgaggcctatcccagcaagtgctgctctgctc

SEQ ID NO: 22585 - DNA, 122 bp, Homo sapiens
  misc_feature (61)..(62): /note="This region represents a CpG dinucleotide"
  misc_feature (61)..(61): /note="Nucleotide may be methylated to form 5-methylcytosine"
agttgaagctgctgtggttccagacgcaggcaggtcacccctgatgctttcaacaagaggcgtgcagtgcatcgcaggacatctgctaagggccatctcagaggcccacccctggaagccac

SEQ ID NO: 22586 - DNA, 122 bp, Homo sapiens
  misc_feature (61)..(62): /note="This region represents a CpG dinucleotide"
  misc_feature (61)..(61): /note="Nucleotide may be methylated to form 5-methylcytosine"
ttctaagagcttcacaacaagcctatgaaataggtgctaccactctttacagatgaagaacggatgcaagttcacacaagcagtgcatttcagagttgaaatcagaaactatatagtttaga

SEQ ID NO: 22587 - DNA, 122 bp, Homo sapiens
  misc_feature (61)..(62): /note="This region represents a CpG dinucleotide"
  misc_feature (61)..(61): /note="Nucleotide may be methylated to form 5-methylcytosine"
ctcctctttgtcttcagcatctatgcttcttattgctaattaaacttcagctatcccttccgccttctggctcttagtcatgccaagtgtgtggcaactttaggacttttgcaaagctgttc

SEQ ID NO: 22588 - DNA, 122 bp, Homo sapiens
  misc_feature (61)..(62): /note="This region represents a CpG dinucleotide"
  misc_feature (61)..(61): /note="Nucleotide may be methylated to form 5-methylcytosine"
ctgtgtccagttatctctaagataacctgataaacttagccaaatggtaagtgatccgcccgtctcaacctcccaaagtgcgagattgcaggtgtgagccactgcgccaaacggtatagtgt

SEQ ID NO: 22589 - DNA, 122 bp, Homo sapiens
  misc_feature (61)..(62): /note="This region represents a CpG dinucleotide"
  misc_feature (61)..(61): /note="Nucleotide may be methylated to form 5-methylcytosine"
tccacccaaagaccgtgctggttgcacaagataaaaaggaaaagcagaagttattttctacgattgctacggaataatgggaaaaggagaactaagaaagtttactacttctaaagtccaat

SEQ ID NO: 22590 - DNA, 122 bp, Homo sapiens
  misc_feature (61)..(62): /note="This region represents a CpG dinucleotide"
  misc_feature (61)..(61): /note="Nucleotide may be methylated to form 5-methylcytosine"
gcctggagctgccagggcttcagctcaaatacccatgatatggacattcacagaagagggcgacagcctggagactgaagagggaattggcacagaaaacagaggaataagtgctgacacat

SEQ ID NO: 22591 - DNA, 122 bp, Homo sapiens
  misc_feature (61)..(62): /note="This region represents a CpG dinucleotide"
  misc_feature (61)..(61): /note="Nucleotide may be methylated to form 5-methylcytosine"
ctggagttgattcatacagtagtcatcaatggatacaaagcctggtgggtggaggtttgacggggaatgggatattagggtagttgcagagtatttcccagaaaatacttattatttggaaa

SEQ ID NO: 22592 - DNA, 122 bp, Homo sapiens
  misc_feature (61)..(62): /note="This region represents a CpG dinucleotide"
  misc_feature (61)..(61): /note="Nucleotide may be methylated to form 5-methylcytosine"
cacatgccctgtaccatccccacactagaagtgcaaaaaagtctaacagctacgcaccagcgaaccaaggtgtcatggcttctgaggagagggacacacacactccagtcccagagctcccg

SEQ ID NO: 22593 - DNA, 122 bp, Homo sapiens
  misc_feature (61)..(62): /note="This region represents a CpG dinucleotide"
  misc_feature (61)..(61): /note="Nucleotide may be methylated to form 5-methylcytosine"
gaaggggagggcagccgtggcgtggagggccttgcgcacccaggtggtgatgagggcgggcggggcgcggggaacgtgcagccagagaccgtgctaagaccccgaagtcgagccctgggcag

SEQ ID NO: 22594 - DNA, 122 bp, Homo sapiens
  misc_feature (61)..(62): /note="This region represents a CpG dinucleotide"
  misc_feature (61)..(61): /note="Nucleotide may be methylated to form 5-methylcytosine"
actatagatttcacaactctcttaccttggctgccactataaaatgccacaggccaggtacggtggctcatgcctataatctcagcactttgggaggctgaagcgggtggatcacccgaggt

SEQ ID NO: 22595 - DNA, 122 bp, Homo sapiens
  misc_feature (61)..(62): /note="This region represents a CpG dinucleotide"
  misc_feature (61)..(61): /note="Nucleotide may be methylated to form 5-methylcytosine"
aagaagagtgtttcctttagactgttgatataatgtgaaatactgacagtttaatggacccgtaggttgatatgtaccctggaggaaatttgggtatgtattcacacagctgcagatgaatg

SEQ ID NO: 22596 - DNA, 122 bp, Homo sapiens
  misc_feature (61)..(62): /note="This region represents a CpG dinucleotide"
  misc_feature (61)..(61): /note="Nucleotide may be methylated to form 5-methylcytosine"
tccaaaaagtttgtgttcatcagctgtgaatgtgaattctaacttcctgcactcagtacccgttactgcctcactgtttcctgttgacactttgaacgatcagttttctgcctcttaattgt

SEQ ID NO: 22597 - DNA, 122 bp, Homo sapiens
  misc_feature (61)..(62): /note="This region represents a CpG dinucleotide"
  misc_feature (61)..(61): /note="Nucleotide may be methylated to form 5-methylcytosine"
cagttaggcaggcctagcctaattttgatccctgtatccaaaatgttgctgagtgcctcccgctacaacccgtggctcctaagtggaaatgtgtgctctgctgttgtctctagggttgccaa

SEQ ID NO: 22598 - DNA, 122 bp, Homo sapiens
  misc_feature (61)..(62): /note="This region represents a CpG dinucleotide"
  misc_feature (61)..(61): /note="Nucleotide may be methylated to form 5-methylcytosine"
gatttaaatgctgttcttactcagaggactctgttgagcacactttgcttgtcatgataccgttttgcctagagatcattcattgctttagtcataatctgatgattgcaaaacttctcctt

SEQ ID NO: 22599 - DNA, 122 bp, Homo sapiens
  misc_feature (61)..(62): /note="This region represents a CpG dinucleotide"
  misc_feature (61)..(61): /note="Nucleotide may be methylated to form 5-methylcytosine"
cgcatgcacagcgagagggcatgaaggtgagcgtgggggcagcgtcccgcttgttggtcccgcttggataacgcagaagcgtggaagcaggtccgggcatgctggcagccatgtgggagttt

SEQ ID NO: 22600 - DNA, 122 bp, Homo sapiens
  misc_feature (61)..(62): /note="This region represents a CpG dinucleotide"
  misc_feature (61)..(61): /note="Nucleotide may be methylated to form 5-methylcytosine"
taggcagtctgtgaacctgcaggaacaagccagtgagtcagggcaccaagtgtggacatacggctatctggattaaatatctgtaaatatctgacccttttgaggttttgagactttattct

SEQ ID NO: 22601 - DNA, 122 bp, Homo sapiens
  misc_feature (61)..(62): /note="This region represents a CpG dinucleotide"
  misc_feature (61)..(61): /note="Nucleotide may be methylated to form 5-methylcytosine"
tcatttgttaaggtgctgtctgtggctgctttcctgctgcaacacagagctgagtagttgcgacagacaagacatggctcaccaggcctaaaatgtttactatctggccctttacaggggaa

SEQ ID NO: 22602 - DNA, 122 bp, Homo sapiens
  misc_feature (61)..(62): /note="This region represents a CpG dinucleotide"
  misc_feature (61)..(61): /note="Nucleotide may be methylated to form 5-methylcytosine"
tgaaggactggacacgaggcgtgaaaagcactgaggaatcaaggatgacttggaggtttccggcctgagcaaccagaaggctcaagttgccatgacgggaggctgaaagagcaagtggatct

SEQ ID NO: 22603 - DNA, 122 bp, Homo sapiens
  misc_feature (61)..(62): /note="This region represents a CpG dinucleotide"
  misc_feature (61)..(61): /note="Nucleotide may be methylated to form 5-methylcytosine"
acttctctcccagtggctgttgtgagcagtttgcttgaactgaggaagtcctatctggggcgggaaggggaggagtgaagggagcagggatcactatggaggctgggcagggggtgggggca

SEQ ID NO: 22604 - DNA, 122 bp, Homo sapiens
  misc_feature (61)..(62): /note="This region represents a CpG dinucleotide"
  misc_feature (61)..(61): /note="Nucleotide may be methylated to form 5-methylcytosine"
taagtagggctgcctcaggctcccatgaaggttctcaggatgtcacccgtgctccacttgcgcttggtgtggccttgttgctccagtccagcagcagcaattgtcctaggtgtggctgtgtg

SEQ ID NO: 22605 - DNA, 122 bp, Homo sapiens
  misc_feature (61)..(62): /note="This region represents a CpG dinucleotide"
  misc_feature (61)..(61): /note="Nucleotide may be methylated to form 5-methylcytosine"
acgtgcagttggtgcccagtaaaagatgcctgcaggctagtgctctcccttgcccatcaccgactctgctttagaaagatgcatcttcctgtcaaatcccagttactaggtgttgaagagtt

SEQ ID NO: 22606 - DNA, 122 bp, Homo sapiens
  misc_feature (61)..(62): /note="This region represents a CpG dinucleotide"
  misc_feature (61)..(61): /note="Nucleotide may be methylated to form 5-methylcytosine"
atcattaccttcatctgcactgcatcagggctacaagctacttctgccttagaaattgtacgtgtccctctaatagcccagtgaagtggggccctcacagattaattactatttccatttgg

SEQ ID NO: 22607 - DNA, 122 bp, Homo sapiens
  misc_feature (61)..(62): /note="This region represents a CpG dinucleotide"
  misc_feature (61)..(61): /note="Nucleotide may be methylated to form 5-methylcytosine"
aatcaaaggcggggtacagggccagagggaggaggaaacaacttcccggttgctttcagacgcttcagagatcctctggaggcctgggggagcttttgagtactttatttcagttggtccct

SEQ ID NO: 22608 - DNA, 122 bp, Homo sapiens
  misc_feature (61)..(62): /note="This region represents a CpG dinucleotide"
  misc_feature (61)..(61): /note="Nucleotide may be methylated to form 5-methylcytosine"
gtgttgaatttggcactctggctttatactattcatacaaagccttccccattctgagatcgtaaacacaacccatgctgtcctggtgctattacagcttcccttttcacagtagatctctg

SEQ ID NO: 22609 - DNA, 122 bp, Homo sapiens
  misc_feature (61)..(62): /note="This region represents a CpG dinucleotide"
  misc_feature (61)..(61): /note="Nucleotide may be methylated to form 5-methylcytosine"
ctagaggaaatgctccctaataacacaaagcactttcacagatagattttgccacaaaaacgttcaattgttcaacaatgttgattacttacaggcaaaactaaagctgaaatggataagat

SEQ ID NO: 22610 - DNA, 122 bp, Homo sapiens
  misc_feature (61)..(62): /note="This region represents a CpG dinucleotide"
  misc_feature (61)..(61): /note="Nucleotide may be methylated to form 5-methylcytosine"
ggtggggaagattccgttattttcctgaacacctaacagtgatgctgcaggctttctggacgggacgggacctcagacacaataatccattccgccgtcgccacgcagtgcctttcgaccat

SEQ ID NO: 22611 - DNA, 122 bp, Homo sapiens
  misc_feature (61)..(62): /note="This region represents a CpG dinucleotide"
  misc_feature (61)..(61): /note="Nucleotide may be methylated to form 5-methylcytosine"
ccaggtcagaggtggcaacctgtacatggatgacacactgggggactgggcctcgccctgcggggggacctgggtgggtgggaatgccagctgcccggccagaatcccacgagactggtcag

SEQ ID NO: 22612 - DNA, 122 bp, Homo sapiens
  misc_feature (61)..(62): /note="This region represents a CpG dinucleotide"
  misc_feature (61)..(61): /note="Nucleotide may be methylated to form 5-methylcytosine"
ctactcggggggattgcttgggcccatgaggttgaggctgtagtaatagcaagccatgttcgcaccactgcactccagccccaccccccaaaaaaaacccaaaacagagaactaaggaactt

SEQ ID NO: 22613 - DNA, 122 bp, Homo sapiens
  misc_feature (61)..(62): /note="This region represents a CpG dinucleotide"
  misc_feature (61)..(61): /note="Nucleotide may be methylated to form 5-methylcytosine"
agaagcttcatgaataatttaactgcttgcttttcctctcagatttcacacattttgccacgtcattatttaaggaaactttctcatattgtaatacttcctcttttctattcaaagaaatt

SEQ ID NO: 22614 - DNA, 122 bp, Homo sapiens
  misc_feature (61)..(62): /note="This region represents a CpG dinucleotide"
  misc_feature (61)..(61): /note="Nucleotide may be methylated to form 5-methylcytosine"
tggagaaggatggcatggccttccaggaggccctagacccagggccctttggtgagaacccgttttctccttccttccccagcctgtcttgtcccatccctgcccctccacagagtgctaga

SEQ ID NO: 22615 - DNA, 122 bp, Homo sapiens
  misc_feature (61)..(62): /note="This region represents a CpG dinucleotide"
  misc_feature (61)..(61): /note="Nucleotide may be methylated to form 5-methylcytosine"
tgttgttcccttacatattaaaactattcagctcatttctttggaatcactcccccatgccgccatcctcaatgtttaaattccttattactcatcaggttaatgtgagaatcctattgcaa

SEQ ID NO: 22616 - DNA, 122 bp, Homo sapiens
  misc_feature (61)..(62): /note="This region represents a CpG dinucleotide"
  misc_feature (61)..(61): /note="Nucleotide may be methylated to form 5-methylcytosine"
tctgtcttgtcaatccacatagtgatcatcatcttggctgcacagatgagtcaatagaggcgtggagatgttgaataatgagcttaaagtcatgccattaatcagtggtgtccatctgcctc

SEQ ID NO: 22617 - DNA, 122 bp, Homo sapiens
  misc_feature (61)..(62): /note="This region represents a CpG dinucleotide"
  misc_feature (61)..(61): /note="Nucleotide may be methylated to form 5-methylcytosine"
tggaatctgaagcctctgggctgcctatgactcaccctgccctaataccttgccctaatacgctattgctgagagtgctgcagggagacaaggctgctctctggtttatcctgcgtcccatg

SEQ ID NO: 22618 - DNA, 122 bp, Homo sapiens
  misc_feature (61)..(62): /note="This region represents a CpG dinucleotide"
  misc_feature (61)..(61): /note="Nucleotide may be methylated to form 5-methylcytosine"
tactaaagcaaactctcttttctttaaacatgattaatatcatttaagggttgttattagcggtgtcacttctaaaaagtgtgaccaatttgtaatgaaagagccttgtgtacacgaatggg

SEQ ID NO: 22619 - DNA, 122 bp, Homo sapiens
  misc_feature (61)..(62): /note="This region represents a CpG dinucleotide"
  misc_feature (61)..(61): /note="Nucleotide may be methylated to form 5-methylcytosine"
tttgcaccaagcacagaaccaaaaactttcatcaccattatttcatttagtcttctcaaccgcatgaagcagggattcttgatcaaaatatccatttcacaggtgaggaaactgaggctatg

SEQ ID NO: 22620 - DNA, 122 bp, Homo sapiens
  misc_feature (61)..(62): /note="This region represents a CpG dinucleotide"
  misc_feature (61)..(61): /note="Nucleotide may be methylated to form 5-methylcytosine"
taccagtggctgaaacaatcagcacccatgcccatgagtagaggctgaccgtgagtcactcggagaatctctgtatcttcctatttccaagaaatcagtgaaaagttgtgcaacttttttag

SEQ ID NO: 22621 - DNA, 122 bp, Homo sapiens
  misc_feature (61)..(62): /note="This region represents a CpG dinucleotide"
  misc_feature (61)..(61): /note="Nucleotide may be methylated to form 5-methylcytosine"
cagcactttatttcttttcagtcctttaatcctaatgccagggccttactcataaagcttcgtaaatctgtggccactgaaatatcctctctccacctgccaataacttcttaaacacacat

SEQ ID NO: 22622 - DNA, 122 bp, Homo sapiens
  misc_feature (61)..(62): /note="This region represents a CpG dinucleotide"
  misc_feature (61)..(61): /note="Nucleotide may be methylated to form 5-methylcytosine"
tccttgtgccaacaggtcatgagacactgaggtcttaatctaaaagccactgacaaactgcgtgtcactaacaaccttgtgagtgagcctgaggtggatctttctcagtggagccttgagat

SEQ ID NO: 22623 - DNA, 122 bp, Homo sapiens
  misc_feature (61)..(62): /note="This region represents a CpG dinucleotide"
  misc_feature (61)..(61): /note="Nucleotide may be methylated to form 5-methylcytosine"
attgcccctgcctctgcctttaagtctggtctgcgtggcttctgatagcgaagccaggggcggaccccgttcactgcatcaggagagccctgagcagcgcttggcaggaactctgcagccca

SEQ ID NO: 22624 - DNA, 122 bp, Homo sapiens
  misc_feature (61)..(62): /note="This region represents a CpG dinucleotide"
  misc_feature (61)..(61): /note="Nucleotide may be methylated to form 5-methylcytosine"
gctagtacccctcctgggtacataacaagaaggtgcacatgtacagtctctctgggtgtccgcaagtgtgggcctcagaaaatgaaagtgacacccggacaacacacagctgtgtctggcac

SEQ ID NO: 22625 - DNA, 122 bp, Homo sapiens
  misc_feature (61)..(62): /note="This region represents a CpG dinucleotide"
  misc_feature (61)..(61): /note="Nucleotide may be methylated to form 5-methylcytosine"
tttaaagctattgtcccagaatacgtggtgtgttttttgaggaggaggaagatctatccacggcacacatcaggaagaggtggttaaaggtcagagagttattctgcagaaaatccatctga

SEQ ID NO: 22626 - DNA, 122 bp, Homo sapiens
  misc_feature (61)..(62): /note="This region represents a CpG dinucleotide"
  misc_feature (61)..(61): /note="Nucleotide may be methylated to form 5-methylcytosine"
agccctccccaccccgcccacaagcccagcgccttcctgaagtgaccctccctgcagaggcgatattaatagccgtggcagggctcgaatcacaggccaagaatgttacccagcagctcgtg

SEQ ID NO: 22627 - DNA, 122 bp, Homo sapiens
  misc_feature (61)..(62): /note="This region represents a CpG dinucleotide"
  misc_feature (61)..(61): /note="Nucleotide may be methylated to form 5-methylcytosine"
tacaggtgtgagccaccacgcccagccaacaattcttatttgcttactctgtagatggcacggtgctggatgatttacctgcattattttatttactccaaaaaccctaagggtactattat

SEQ ID NO: 22628 - DNA, 122 bp, Homo sapiens
  misc_feature (61)..(62): /note="This region represents a CpG dinucleotide"
  misc_feature (61)..(61): /note="Nucleotide may be methylated to form 5-methylcytosine"
aatcacctgggaaagagccttggacccaacacattagctttccagttgttttctttgatacgtcccagatctgtgaacttgcacaagccactcccattctgcttttttttgttgttgttgag

SEQ ID NO: 22629 - DNA, 122 bp, Homo sapiens
  misc_feature (61)..(62): /note="This region represents a CpG dinucleotide"
  misc_feature (61)..(61): /note="Nucleotide may be methylated to form 5-methylcytosine"
acaagttttctatttaaccagaggtccttttcatgttactcacagaggagacactcaagacggggtatcaatggaattgcagtttgataactaaacagaagcacacttgaaactctggtgac

SEQ ID NO: 22630 - DNA, 122 bp, Homo sapiens
  misc_feature (61)..(62): /note="This region represents a CpG dinucleotide"
  misc_feature (61)..(61): /note="Nucleotide may be methylated to form 5-methylcytosine"
ttctctggatgtaccaacatttatgaaatgaaagcgtagaagagagcaagggtttgaacgcgtgtagacctgtagtatttgtttgtttttattggctaactagtaaatatagctctggggct

SEQ ID NO: 22631 - DNA, 122 bp, Homo sapiens
  misc_feature (61)..(62): /note="This region represents a CpG dinucleotide"
  misc_feature (61)..(61): /note="Nucleotide may be methylated to form 5-methylcytosine"
acaatggtactcaccactgacttaagcaatgcagagcacataagcactaagagactccttcggcagggcgtggtggctcctgcctgtaatcccagcactttgggagggtgaggtgggtggat

SEQ ID NO: 22632 - DNA, 122 bp, Homo sapiens
  misc_feature (61)..(62): /note="This region represents a CpG dinucleotide"
  misc_feature (61)..(61): /note="Nucleotide may be methylated to form 5-methylcytosine"
caagggttggtaactattcgcagatttaccctaactcagttttgctgagcgttgtgacagcgtcatttcctaagaggttacttacccaacagcctgaaccattctgaaacaaaagcagaggt

SEQ ID NO: 22633 - DNA, 122 bp, Homo sapiens
  misc_feature (61)..(62): /note="This region represents a CpG dinucleotide"
  misc_feature (61)..(61): /note="Nucleotide may be methylated to form 5-methylcytosine"
cagttttaagactgttggctttgaagcctgacttgcattctagctttccttcttcactagcgtgacaactgtagaagttcaccaaccccagtttcctcttctgtgaaaaggggaaagtccct

SEQ ID NO: 22634 - DNA, 122 bp, Homo sapiens
  misc_feature (61)..(62): /note="This region represents a CpG dinucleotide"
  misc_feature (61)..(61): /note="Nucleotide may be methylated to form 5-methylcytosine"
ctgtggtgagtcatggacagatggtggctaagcgccactgtaagggtggagagtgggtgacggcaccttggtccccaggagccctctggccacatggcacagcagtgccttcaggtccaagg

SEQ ID NO: 22635 - DNA, 122 bp, Homo sapiens
  misc_feature (61)..(62): /note="This region represents a CpG dinucleotide"
  misc_feature (61)..(61): /note="Nucleotide may be methylated to form 5-methylcytosine"
tcccaaagtgctgggattacaggcgtgagccaccgtgcccagctggtttattttcaaacacgtatttataaggtgacctatgaagttgaagttgtgcagcctttctctagttatataaggct

SEQ ID NO: 22636 - DNA, 122 bp, Homo sapiens
  misc_feature (61)..(62): /note="This region represents a CpG dinucleotide"
  misc_feature (61)..(61): /note="Nucleotide may be methylated to form 5-methylcytosine"
tcaggtctgaaaaagaagctatcagctgatgggcttcatgcccgcacatgtgctgagttccgctcaggctaaatggatggcagctcccaacagaatcctttcagtgccagcatcgggctgat

SEQ ID NO: 22637 - DNA, 122 bp, Homo sapiens
  misc_feature (61)..(62): /note="This region represents a CpG dinucleotide"
  misc_feature (61)..(61): /note="Nucleotide may be methylated to form 5-methylcytosine"
gggctcaacctggagcaggaagctgaggcctgagctctgggaaagagaggtggtgactcacggagagatattagagtccaaataggagcacatgccctgtacaccaggcatttgggtctcat

SEQ ID NO: 22638 - DNA, 122 bp, Homo sapiens
  misc_feature (61)..(62): /note="This region represents a CpG dinucleotide"
  misc_feature (61)..(61): /note="Nucleotide may be methylated to form 5-methylcytosine"
aaatgcttgggcatgacaaccctagaaggcataaggcccgatgtgtgtactttctgataacgaatgtttggctttaagagaagattgtcagaagctattacaaagaagaatatagcaacaca

SEQ ID NO: 22639 - DNA, 122 bp, Homo sapiens
  misc_feature (61)..(62): /note="This region represents a CpG dinucleotide"
  misc_feature (61)..(61): /note="Nucleotide may be methylated to form 5-methylcytosine"
ctactgtaatgagtcagtgaggaccatttacaacacacctatgcaaaggcatccgggagacgagttcaaacttgacttggggacacccaagtcctgcagccttaggatgccctattgatagc

SEQ ID NO: 22640 - DNA, 122 bp, Homo sapiens
  misc_feature (61)..(62): /note="This region represents a CpG dinucleotide"
  misc_feature (61)..(61): /note="Nucleotide may be methylated to form 5-methylcytosine"
ttcatcatctctcccaaaagtcaagaggaaatcagaaagtggcaggtttggtggggggcacggatgctaaaagggcacaacatgggcattcctgaagcatcactgcccaatccagcagcccc

SEQ ID NO: 22641 - DNA, 122 bp, Homo sapiens
  misc_feature (61)..(62): /note="This region represents a CpG dinucleotide"
  misc_feature (61)..(61): /note="Nucleotide may be methylated to form 5-methylcytosine"
cttcctctttgaacagttgccttttcctctcacagaaggaagatttcattttgtttgagacgagaaaccaaaccacacaccaaagagaggggtatgatggctaagaagcccccaaaaccagc

SEQ ID NO: 22642 - DNA, 122 bp, Homo sapiens
  misc_feature (61)..(62): /note="This region represents a CpG dinucleotide"
  misc_feature (61)..(61): /note="Nucleotide may be methylated to form 5-methylcytosine"
cacctcattacacatcaggaaattgaggcacagggagattaggggacctgcttaaggccacgcagataagaaggggcaaagcctaaattctaacccaggctcttggctccagcatccatgct

SEQ ID NO: 22643 - DNA, 122 bp, Homo sapiens
  misc_feature (61)..(62): /note="This region represents a CpG dinucleotide"
  misc_feature (61)..(61): /note="Nucleotide may be methylated to form 5-methylcytosine"
gttaactcttccccaccaaacaataactagccccatccattatcacgctaagaaaagtttcgtaagtaattacacaacaattagtcatgtcttagcctatttccctagaaagtggattcatg

SEQ ID NO: 22644 - DNA, 122 bp, Homo sapiens
  misc_feature (61)..(62): /note="This region represents a CpG dinucleotide"
  misc_feature (61)..(61): /note="Nucleotide may be methylated to form 5-methylcytosine"
tgcacttgatctccttttaaaggggaaattacatttcttgttaagactgaaagaggctgccgaactttggaggaaattactatgttgttctcaggacagctggaagaatttctgaaagagaa

SEQ ID NO: 22645 - DNA, 122 bp, Homo sapiens
  misc_feature (61)..(62): /note="This region represents a CpG dinucleotide"
  misc_feature (61)..(61): /note="Nucleotide may be methylated to form 5-methylcytosine"
attaaagacttcaagaagtcctacattaagaaatctgtgtgactgtttaacccaacatagcgcagatccacataacctctttacttaggtttgtttattttactacaatcaccataacaagt

SEQ ID NO: 22646 - DNA, 122 bp, Homo sapiens
  misc_feature (61)..(62): /note="This region represents a CpG dinucleotide"
  misc_feature (61)..(61): /note="Nucleotide may be methylated to form 5-methylcytosine"
cctctcacccttctttcttctcttccttccttccctcctaccttcctcccttccatcccccgattttaaaaaccacagtgattgaaactaaagagctggcctacgcacctcagggctgagga

SEQ ID NO: 22647 - DNA, 122 bp, Homo sapiens
  misc_feature (61)..(62): /note="This region represents a CpG dinucleotide"
  misc_feature (61)..(61): /note="Nucleotide may be methylated to form 5-methylcytosine"
atgtctgacttaaactgtgcattgtcctttaccctctgacatatagagcaaaaatgattacgtttctctaaacatgtgaccttgctttggcacagacttgacatcttactcaacttctttcc

SEQ ID NO: 22648 - DNA, 122 bp, Homo sapiens
  misc_feature (61)..(62): /note="This region represents a CpG dinucleotide"
  misc_feature (61)..(61): /note="Nucleotide may be methylated to form 5-methylcytosine"
ttattttctgacgggctggctggcctgcactggtgagttctctctcaggtcacagcagaccgaaccactaggcttaccagtgactaatctcacagcaggcatacccagctcatgctcttcct

SEQ ID NO: 22649 - DNA, 122 bp, Homo sapiens
  misc_feature (61)..(62): /note="This region represents a CpG dinucleotide"
  misc_feature (61)..(61): /note="Nucleotide may be methylated to form 5-methylcytosine"
attgatgtggatgagcactctggactccacttggcagttgagggcttttgtttaaccaggcgtgtgtcactgccgccacctttgtaagcagagatttggtgctcactaatcggcttggagca

SEQ ID NO: 22650 - DNA, 122 bp, Homo sapiens
  misc_feature (61)..(62): /note="This region represents a CpG dinucleotide"
  misc_feature (61)..(61): /note="Nucleotide may be methylated to form 5-methylcytosine"
tgatgggctaggttctgggggcacaaaggtgactcactcagtgttcctgctccttaaggacgaactgccatgtgcagagtgagcccaggggagcaggtggttaactcaggggcatcaagggg

SEQ ID NO: 22651 - DNA, 122 bp, Homo sapiens
  misc_feature (61)..(62): /note="This region represents a CpG dinucleotide"
  misc_feature (61)..(61): /note="Nucleotide may be methylated to form 5-methylcytosine"
agaaaaaagaattccagagagagttgtatgatttcacaatgcatactccaaagccccgaacgatcaactcactcatcttgcctcaggagtttttgttgctgtaaacaagagctacttttcca

SEQ ID NO: 22652 - DNA, 122 bp, Homo sapiens
  misc_feature (61)..(62): /note="This region represents a CpG dinucleotide"
  misc_feature (61)..(61): /note="Nucleotide may be methylated to form 5-methylcytosine"
cgtgcagccacttcagtgaggcaatgtgtgctctcttctactatccactatcgcctccaccgccctcaatgagcagaagcaacgtgaccttagtttcaagggcaactacaaaagcaagttaa

SEQ ID NO: 22653 - DNA, 122 bp, Homo sapiens
  misc_feature (61)..(62): /note="This region represents a CpG dinucleotide"
  misc_feature (61)..(61): /note="Nucleotide may be methylated to form 5-methylcytosine"
agtaagacagacactgtagtcttacctaatacaatcatgaaagtgacatactgtctccttcgccatattctgttagagacaggttacagctttgcccagtggcagtatcctagccaatgagg

SEQ ID NO: 22654 - DNA, 122 bp, Homo sapiens
  misc_feature (61)..(62): /note="This region represents a CpG dinucleotide"
  misc_feature (61)..(61): /note="Nucleotide may be methylated to form 5-methylcytosine"
aaaaaaaggagcaaatcttcctttatcctgggtggcggcctgcctgtccatgaatcagtccgtgggcaggcagtggtgtcaaggctgtagaaattccagatgtacggaggtcacggtcccag

SEQ ID NO: 22655 - DNA, 122 bp, Homo sapiens
  misc_feature (61)..(62): /note="This region represents a CpG dinucleotide"
  misc_feature (61)..(61): /note="Nucleotide may be methylated to form 5-methylcytosine"
caaggtggtttttggagggtgcttagttaggaaatgatgaacacagttcaacatgacttgcggccctccccatgggcaagagtatgaacacctgtgactgttcctgaactcactaaggaaag

SEQ ID NO: 22656 - DNA, 122 bp, Homo sapiens
  misc_feature (61)..(62): /note="This region represents a CpG dinucleotide"
  misc_feature (61)..(61): /note="Nucleotide may be methylated to form 5-methylcytosine"
ccattttctggccaggaaacagtttaatttttttccttgggacagtcagcctccaagaagcgagtgcacacatgccaaactcacgtgaaaccaattgttgagtgagattccagtttattaat

SEQ ID NO: 22657 - DNA, 122 bp, Homo sapiens
  misc_feature (61)..(62): /note="This region represents a CpG dinucleotide"
  misc_feature (61)..(61): /note="Nucleotide may be methylated to form 5-methylcytosine"
attacagttgagagcagagcaaatcctttaattgtataagagcatcagattaagcagtaacgtccatgcagttcattctgctagctggtagtctcttctcagaaacaaatgtttactaagta

SEQ ID NO: 22658 - DNA, 122 bp, Homo sapiens
  misc_feature (61)..(62): /note="This region represents a CpG dinucleotide"
  misc_feature (61)..(61): /note="Nucleotide may be methylated to form 5-methylcytosine"
atatgcaatacatgtttgttggactgaactgaaactgtgacgcagggattcaaagttccacgaagaggagaaagttaacaggcaacaagaacatgacaaagaggatgttcacatcctgaagc

SEQ ID NO: 22659 - DNA, 122 bp, Homo sapiens
  misc_feature (61)..(62): /note="This region represents a CpG dinucleotide"
  misc_feature (61)..(61): /note="Nucleotide may be methylated to form 5-methylcytosine"
aaactcaaagctgatactgtgtgtgtatgttgtcgttccagtgcctcatggcgtgggagtcgattattccactactgcaggagaaacaagaggccaagtaaagttctttcttgggacggaga

SEQ ID NO: 22660 - DNA, 122 bp, Homo sapiens
  misc_feature (61)..(62): /note="This region represents a CpG dinucleotide"
  misc_feature (61)..(61): /note="Nucleotide may be methylated to form 5-methylcytosine"
ctctagaatttgtactaaaggtgggtggaaattccactcttagatccaggcaccctcaggcgtcagccctgagccctgtgctttgcaaacttctcaagctattattatgtaaaaatagatat

SEQ ID NO: 22661 - DNA, 122 bp, Homo sapiens
  misc_feature (61)..(62): /note="This region represents a CpG dinucleotide"
  misc_feature (61)..(61): /note="Nucleotide may be methylated to form 5-methylcytosine"
gtaaaggctggctttcatcaccaccagcgggctaacctcctacatatatctgtgtgtctacggcaaggtcgacagaacccatatataaggaaatactgatactgaaaaacttgaaaaacctg

SEQ ID NO: 22662 - DNA, 122 bp, Homo sapiens
  misc_feature (61)..(62): /note="This region represents a CpG dinucleotide"
  misc_feature (61)..(61): /note="Nucleotide may be methylated to form 5-methylcytosine"
gacggcaggggtccatccgtccactgtgtgctgggcaaggtcagtacggcaggagggggacgcctcctctttctgtttctctaacactgcctcataaacacacacagcaacctttccaaatg

SEQ ID NO: 22663 - DNA, 122 bp, Homo sapiens
  misc_feature (61)..(62): /note="This region represents a CpG dinucleotide"
  misc_feature (61)..(61): /note="Nucleotide may be methylated to form 5-methylcytosine"
caggctctgagaagcgtcccggggcctctcctcctgccgcttaactccctcagctccctccgcatcagtgcaggcccggggcaagttcctctagttcagaacacagattaagctcctctgtc

SEQ ID NO: 22664 - DNA, 122 bp, Homo sapiens
  misc_feature (61)..(62): /note="This region represents a CpG dinucleotide"
  misc_feature (61)..(61): /note="Nucleotide may be methylated to form 5-methylcytosine"
gctgggcggagtcagatcggctttaatagagggagcctgaggaggctcccggggtgcgggcgcggcccagccccctcctacttggctgcggctggcggtggggcctgggccgacgctggtgc

SEQ ID NO: 22665 - DNA, 122 bp, Homo sapiens
  misc_feature (61)..(62): /note="This region represents a CpG dinucleotide"
  misc_feature (61)..(61): /note="Nucleotide may be methylated to form 5-methylcytosine"
gcttttatgcccttggctgggtgtgacggaaaggggcagggacagacaaaacttggagtgcggtcccagctgtagaatgccagtctggcagacataacaaaagtgagcacttcttcgctttt

SEQ ID NO: 22666 - DNA, 122 bp, Homo sapiens
  misc_feature (61)..(62): /note="This region represents a CpG dinucleotide"
  misc_feature (61)..(61): /note="Nucleotide may be methylated to form 5-methylcytosine"
attacatttcagagaacaatgtttaggttataaggttcccgtcagagctgtttcacaacacgtgtttacataatctgaagtgaaggcagcagtggactgtaaaaccggccagccaggccagt

SEQ ID NO: 22667 - DNA, 122 bp, Homo sapiens
  misc_feature (61)..(62): /note="This region represents a CpG dinucleotide"
  misc_feature (61)..(61): /note="Nucleotide may be methylated to form 5-methylcytosine"
aagctctaaaatgtgattcttcacatgactcaactgtgactccggcatctgggtagggctcgcacctcccccattcccatgcccagggctgcactgttcacagactagcccagggccgcagt

SEQ ID NO: 22668 - DNA, 122 bp, Homo sapiens
  misc_feature (61)..(62): /note="This region represents a CpG dinucleotide"
  misc_feature (61)..(61): /note="Nucleotide may be methylated to form 5-methylcytosine"
ccagacccgtcctgctgacaaactcaccaggccctggtgtccccaaaaccagttctgtttcgggggttgaggaaaacactggaggcggcggcagttgtcatagaaggtgtaggtccaggcca

SEQ ID NO: 22669 - DNA, 122 bp, Homo sapiens
  misc_feature (61)..(62): /note="This region represents a CpG dinucleotide"
  misc_feature (61)..(61): /note="Nucleotide may be methylated to form 5-methylcytosine"
atgtggaaggccccagcggagaaggccacggagaagacgcccagcgccccgctgagcccccgctgacgcagcccacaagggacccacccagtgccaagtggtgcagaagcaccactcaatcc

SEQ ID NO: 22670 - DNA, 122 bp, Homo sapiens
  misc_feature (61)..(62): /note="This region represents a CpG dinucleotide"
  misc_feature (61)..(61): /note="Nucleotide may be methylated to form 5-methylcytosine"
gcttggctgtggggctgtgaggatgagctggaggcaggtggaagcttgatttttgagtgtcgcaaatactggactgatgactcggaacttgacttggtagtggggggcagtggtagtcttgt

SEQ ID NO: 22671 - DNA, 122 bp, Homo sapiens
  misc_feature (61)..(62): /note="This region represents a CpG dinucleotide"
  misc_feature (61)..(61): /note="Nucleotide may be methylated to form 5-methylcytosine"
agaggccctcttatctgtcttaggtgatatcgttctcagggttcctcctggggcgaggcacgccaggtctgcttggcaacgctgttttcctctgtcaggagcagtttgcagagagaaaactg

SEQ ID NO: 22672 - DNA, 122 bp, Homo sapiens
  misc_feature (61)..(62): /note="This region represents a CpG dinucleotide"
  misc_feature (61)..(61): /note="Nucleotide may be methylated to form 5-methylcytosine"
gcatggcgtgtcagaagacttggggctgtggcgtgaccttgagtgagtcactccacttcccgcagcttcaaagtcttcatctaaaatgcaggtcatgctgcctgcattgtggggaagattag

SEQ ID NO: 22673 - DNA, 122 bp, Homo sapiens
  misc_feature (61)..(62): /note="This region represents a CpG dinucleotide"
  misc_feature (61)..(61): /note="Nucleotide may be methylated to form 5-methylcytosine"
agctggtaaaggcacaggctacagaacgctggcaggcatgagaaatgcagctcaggggcccgctctgctgaagtcttcctactgatctcacctcatgagagcaaggtgccactactgcgggc

SEQ ID NO: 22674 - DNA, 122 bp, Homo sapiens
  misc_feature (61)..(62): /note="This region represents a CpG dinucleotide"
  misc_feature (61)..(61): /note="Nucleotide may be methylated to form 5-methylcytosine"
agcctgagatatgtcggcaattctcagtgtctcagcttttcagttctgtgtgtgtgcacgcgtgtgtggtgtttgtatgtgtcaaattttctgctgtgaaaaccctggcacagatacccaga

SEQ ID NO: 22675 - DNA, 122 bp, Homo sapiens
  misc_feature (61)..(62): /note="This region represents a CpG dinucleotide"
  misc_feature (61)..(61): /note="Nucleotide may be methylated to form 5-methylcytosine"
ctcatgcaggccatctgcaggaactaaggcattcccaagcagtgagcctgctcttggcggcgcatcttggagagttatgaggcagctcaggcctaggcccaccctgccccagggtccaggtg

SEQ ID NO: 22676 - DNA, 122 bp, Homo sapiens
  misc_feature (61)..(62): /note="This region represents a CpG dinucleotide"
  misc_feature (61)..(61): /note="Nucleotide may be methylated to form 5-methylcytosine"
taaaatgctggacaggcttggtatggagcattcacagggtggggctggcacagagtgggacggagcagtgagaggaacaacattgtctggctaattgcatgacttacagtctgaacaacact

SEQ ID NO: 22677 - DNA, 122 bp, Homo sapiens
  misc_feature (61)..(62): /note="This region represents a CpG dinucleotide"
  misc_feature (61)..(61): /note="Nucleotide may be methylated to form 5-methylcytosine"
gtaggactaaaggatagacatgcagaaatgcattttaaaaatctgttagctggaccagaccgacaatgtaacataattgccaaagctttggttcgtgacctgaggttatgtttggtatgaaa

SEQ ID NO: 22678 - DNA, 122 bp, Homo sapiens
  misc_feature (61)..(62): /note="This region represents a CpG dinucleotide"
  misc_feature (61)..(61): /note="Nucleotide may be methylated to form 5-methylcytosine"
tgtctgcatgcgtgtgcatgcatgtgtctgtgtggtttggacttggcgtgttatcccaggcgggccttgccatccagaaaagaagaaggcagttaggaaatgcacttaactgctgcagggaa

SEQ ID NO: 22679 - DNA, 122 bp, Homo sapiens
  misc_feature (61)..(62): /note="This region represents a CpG dinucleotide"
  misc_feature (61)..(61): /note="Nucleotide may be methylated to form 5-methylcytosine"
gtagctcaaccaacgagctatcttggaatgcagtgaagtctgctgtacctcacttcacctcgtttcttcctctgctgtggcctctagtggcctctgttctgttacttttcggtccctgtatt

SEQ ID NO: 22680 - DNA, 122 bp, Homo sapiens
  misc_feature (61)..(62): /note="This region represents a CpG dinucleotide"
  misc_feature (61)..(61): /note="Nucleotide may be methylated to form 5-methylcytosine"
ttcctgatgtgccatctggatatatgttttcaatttgttaatacaatctgctgagaaacacgctaaagaggaagaggctagagtgctcttcgtgttgaaatcaatctattaaaaatggtact

SEQ ID NO: 22681 - DNA, 122 bp, Homo sapiens
  misc_feature (61)..(62): /note="This region represents a CpG dinucleotide"
  misc_feature (61)..(61): /note="Nucleotide may be methylated to form 5-methylcytosine"
aaattaaagaaagtagtcttcctccttttatatctgtttacacagattgttaaaatagtacggttcatttggacgatgttgagatggaaaaaaaatataacttgttccttctgaagagtaga

SEQ ID NO: 22682 - DNA, 122 bp, Homo sapiens
  misc_feature (61)..(62): /note="This region represents a CpG dinucleotide"
  misc_feature (61)..(61): /note="Nucleotide may be methylated to form 5-methylcytosine"
ggcttccatttctttcccactttctgcagggctggtaaggccacagagtctgggcacaggcgtagcccaagtcagcttttgagaaatgatgacagaagcaaaaacctggtaatcctagattt

SEQ ID NO: 22683 - DNA, 122 bp, Homo sapiens
  misc_feature (61)..(62): /note="This region represents a CpG dinucleotide"
  misc_feature (61)..(61): /note="Nucleotide may be methylated to form 5-methylcytosine"
cgaagactggtccgcctgtcaaccttatctttatgggtttttcccaacccagactggccccggcccctttttatctcctgggttgcacttggcttgtttactttgcgaggtcctgggagtcg

SEQ ID NO: 22684 - DNA, 122 bp, Homo sapiens
  misc_feature (61)..(62): /note="This region represents a CpG dinucleotide"
  misc_feature (61)..(61): /note="Nucleotide may be methylated to form 5-methylcytosine"
tcaggccctaaatacacccacccagtataaaattatcctaaacagaaaagaagcaggctgcgattggccgcatattgaaaacagacatgagacagcccccgcccccaactcatccccctccc

SEQ ID NO: 22685 - DNA, 122 bp, Homo sapiens
  misc_feature (61)..(62): /note="This region represents a CpG dinucleotide"
  misc_feature (61)..(61): /note="Nucleotide may be methylated to form 5-methylcytosine"
gctgaggcttcgaggtccaccatcacctcgttttctgccgggcagggactcctgggttggcgctctctaaagccgcttctgtttctaaagttctttgactcatttcttaagcattgcatctg

SEQ ID NO: 22686 - DNA, 122 bp, Homo sapiens
  misc_feature (61)..(62): /note="This region represents a CpG dinucleotide"
  misc_feature (61)..(61): /note="Nucleotide may be methylated to form 5-methylcytosine"
ccatgaaggtaaatgcgcgacttcttggagaagtagctttggcagacaacctggcttggtcgggcagtaggaaaaggagtagacacaggatattcccctctcgcttctttttcttctgccgc

SEQ ID NO: 22687 - DNA, 122 bp, Homo sapiens
  misc_feature (61)..(62): /note="This region represents a CpG dinucleotide"
  misc_feature (61)..(61): /note="Nucleotide may be methylated to form 5-methylcytosine"
cttgaaccatcactcctcttacatagattcacagaccattcttcagaaagtttggaccaacgatgtcaagtttgccattctatctcctgaatgtgtggcaaacatcactagtcagttattga

SEQ ID NO: 22688 - DNA, 122 bp, Homo sapiens
  misc_feature (61)..(62): /note="This region represents a CpG dinucleotide"
  misc_feature (61)..(61): /note="Nucleotide may be methylated to form 5-methylcytosine"
cggaggacctgagttcgcagcaaatttctccagccacccgggagcccgcagcccggccctcgcgtctgcgatgggagctcgataaggtcaccgtcaacagcatccacacggcgccacgccag

SEQ ID NO: 22689 - DNA, 122 bp, Homo sapiens
  misc_feature (61)..(62): /note="This region represents a CpG dinucleotide"
  misc_feature (61)..(61): /note="Nucleotide may be methylated to form 5-methylcytosine"
tcagtgccaggcactggactaaatgctatataggaatttcctcatttgttcatcccagtgcgtggatgaggcaaggactattgttaggtgctaacatcaccctggcaggacagccaactgta

SEQ ID NO: 22690 - DNA, 122 bp, Homo sapiens
  misc_feature (61)..(62): /note="This region represents a CpG dinucleotide"
  misc_feature (61)..(61): /note="Nucleotide may be methylated to form 5-methylcytosine"
gtgcctactgttgtgtggttgctgctctccacatgtggcttttgccctgaactttgagatcgctcctttagcttcacttccccatttccttcagcaggaagagggaggtggaggcacagtct

SEQ ID NO: 22691 - DNA, 122 bp, Homo sapiens
  misc_feature (61)..(62): /note="This region represents a CpG dinucleotide"
  misc_feature (61)..(61): /note="Nucleotide may be methylated to form 5-methylcytosine"
accttgcagctcttgttctattatgtgctgtgtccctacacttaatcctgaaaactcttacgggatttgtcactttacagctaaggaagtttagcttgaagaggctgccaattctgccgaag

SEQ ID NO: 22692 - DNA, 122 bp, Homo sapiens
  misc_feature (61)..(62): /note="This region represents a CpG dinucleotide"
  misc_feature (61)..(61): /note="Nucleotide may be methylated to form 5-methylcytosine"
agcgactgctccaccattgctacatcatgccaggaacacatctttgcctcctcagccagccgcaaaagggagccaccacccctgccagcaaaatgtcttctgcaaggagaccctcttccaat

SEQ ID NO: 22693 - DNA, 122 bp, Homo sapiens
  misc_feature (61)..(62): /note="This region represents a CpG dinucleotide"
  misc_feature (61)..(61): /note="Nucleotide may be methylated to form 5-methylcytosine"
tattatcattgaggccatcagagaatgattttttagtatcttgctaccccaagctttctacgtgagttccaatcacaaaatctcaaacctgcacgtggcttttcaaaaatgacatgctacac

SEQ ID NO: 22694 - DNA, 122 bp, Homo sapiens
  misc_feature (61)..(62): /note="This region represents a CpG dinucleotide"
  misc_feature (61)..(61): /note="Nucleotide may be methylated to form 5-methylcytosine"
tgccccacttccccgagttctaatcagtggcagttctggatcctgattaatgagcccttccgcgctcttggcctttctacccccaactactgctctatagtttcaattttcactccaaatct

SEQ ID NO: 22695 - DNA, 122 bp, Homo sapiens
  misc_feature (61)..(62): /note="This region represents a CpG dinucleotide"
  misc_feature (61)..(61): /note="Nucleotide may be methylated to form 5-methylcytosine"
attcaacaaggactggaggaaaatgcatattaaaatacaaggaaagtctatgtgacacaacgggccaaacattaaggaagatcacactgagtgttgctaaacgtgggagccaaactgttttt

SEQ ID NO: 22696 - DNA, 122 bp, Homo sapiens
  misc_feature (61)..(62): /note="This region represents a CpG dinucleotide"
  misc_feature (61)..(61): /note="Nucleotide may be methylated to form 5-methylcytosine"
gcctcactggccaactgggaaacatccgctgtccaaatattataggacggactattcaaccgcatccctgagctctggtgaaataggcatgcagtataatggaattaacatgattaacagca

SEQ ID NO: 22697 - DNA, 122 bp, Homo sapiens
  misc_feature (61)..(62): /note="This region represents a CpG dinucleotide"
  misc_feature (61)..(61): /note="Nucleotide may be methylated to form 5-methylcytosine"
caagcagggtgcgaaccatccaactccaagcaaagcctgtgctgccgcaactctgcctcacggactcaaagactgtcactggtggtcacagaattagtcaacaggaacttgactgtactggg

SEQ ID NO: 22698 - DNA, 122 bp, Homo sapiens
  misc_feature (61)..(62): /note="This region represents a CpG dinucleotide"
  misc_feature (61)..(61): /note="Nucleotide may be methylated to form 5-methylcytosine"
tcaccccgatgccgaggtggcgtgagtcccagggcctgggtttgggacatgacagtctgtcgccaaggcagcacttaggatgccacagctggcaccgcagatctgtagccggaggaaagggg

SEQ ID NO: 22699 - DNA, 122 bp, Homo sapiens
  misc_feature (61)..(62): /note="This region represents a CpG dinucleotide"
  misc_feature (61)..(61): /note="Nucleotide may be methylated to form 5-methylcytosine"
taacaaacagtttctgttccagcaagcctgagaggtatcagtgactgcttggttgagagccggaattgtcaccacatccatgagtaacaaggagctccccacaaacttgtgtgtcattaaag

SEQ ID NO: 22700 - DNA, 122 bp, Homo sapiens
  misc_feature (61)..(62): /note="This region represents a CpG dinucleotide"
  misc_feature (61)..(61): /note="Nucleotide may be methylated to form 5-methylcytosine"
tggaatgcagaaatgaatggagaccctgtccctgccctcccagtatgcacgagacacatacgccccgtgaagggaaagatgtgtctgtcttgcttattacagcatcccagagccatacacac

SEQ ID NO: 22701 - DNA, 122 bp, Homo sapiens
  misc_feature (61)..(62): /note="This region represents a CpG dinucleotide"
  misc_feature (61)..(61): /note="Nucleotide may be methylated to form 5-methylcytosine"
gaggtgggaatattgctaaggcagctccccagagcacctgcaggaggtggttggcaccagcgccagcctgggcaccttcaatttctactcttgttttccatggctcagcaaaacttgttctc

SEQ ID NO: 22702 - DNA, 122 bp, Homo sapiens
  misc_feature (61)..(62): /note="This region represents a CpG dinucleotide"
  misc_feature (61)..(61): /note="Nucleotide may be methylated to form 5-methylcytosine"
acattataataaagatcatttatttccgttatctgctaagcacagtgctaaacctttacacgttttatatctcgtttagtcctcacaataatcctttacttaaaaggtgagagaactggagc

SEQ ID NO: 22703 - DNA, 122 bp, Homo sapiens
  misc_feature (61)..(62): /note="This region represents a CpG dinucleotide"
  misc_feature (61)..(61): /note="Nucleotide may be methylated to form 5-methylcytosine"
agaccagggtatgacagatgactcacagtctcatctcagctgcaatttttattaactacgcgtgagccacacttagtcattttctgaagcaagaaatttggcacaagatggatttgtgttgg

SEQ ID NO: 22704 - DNA, 122 bp, Homo sapiens
  misc_feature (61)..(62): /note="This region represents a CpG dinucleotide"
  misc_feature (61)..(61): /note="Nucleotide may be methylated to form 5-methylcytosine"
cattcaggagttacaccattagagccctgatttcacatgagtttagtatttcatgctaatcgttttgacatttccagacatcggctaatattggtccccattctacaacagcctatttccct

SEQ ID NO: 22705 - DNA, 122 bp, Homo sapiens
  misc_feature (61)..(62): /note="This region represents a CpG dinucleotide"
  misc_feature (61)..(61): /note="Nucleotide may be methylated to form 5-methylcytosine"
taatcatgtgtttggtcttttgtagcggtcagccctcatcctgaagctatcagaaggacacgtgagtcacctcactggtgtaacaaagacactcctatcactcaggaaattccagggctttt

SEQ ID NO: 22706 - DNA, 122 bp, Homo sapiens
  misc_feature (61)..(62): /note="This region represents a CpG dinucleotide"
  misc_feature (61)..(61): /note="Nucleotide may be methylated to form 5-methylcytosine"
caaatacttttaagtcatggaccaaccttttgagtgtcttcctccagatggcattcataccgcatggtgacatcaccccaagtctaagcagggttcttgatgaagtcacagatgtgttgcaa

SEQ ID NO: 22707 - DNA, 122 bp, Homo sapiens
  misc_feature (61)..(62): /note="This region represents a CpG dinucleotide"
  misc_feature (61)..(61): /note="Nucleotide may be methylated to form 5-methylcytosine"
catttctattttcttccttgtctgaggcttctttatcaagggaattcgaaaagacacattcgtacctttgggcacaggaactggttcctggactttttcaatgttgttcttgtttctgggcc

SEQ ID NO: 22708 - DNA, 122 bp, Homo sapiens
  misc_feature (61)..(62): /note="This region represents a CpG dinucleotide"
  misc_feature (61)..(61): /note="Nucleotide may be methylated to form 5-methylcytosine"
gtatagttgaactgattgaattactatttctgcctagaaccacagaagctcaagagactccggggcctaaaccacaaacaatggctcttttgtctaagaggaacccatggtggggctattac

SEQ ID NO: 22709 - DNA, 122 bp, Homo sapiens
  misc_feature (61)..(62): /note="This region represents a CpG dinucleotide"
  misc_feature (61)..(61): /note="Nucleotide may be methylated to form 5-methylcytosine"
ccaggcactcagtggtgtcacctcaggaggttccgatgacctcacatcaaggtggtgtgccgatgcaggagcaatgcaggccctgaatgttgccccacctgatgcggccactcagctgaccg

SEQ ID NO: 22710 - DNA, 122 bp, Homo sapiens
  misc_feature (61)..(62): /note="This region represents a CpG dinucleotide"
  misc_feature (61)..(61): /note="Nucleotide may be methylated to form 5-methylcytosine"
tagttgcctcttcctgatggggaagtgagctctctccagttctctggctcacagcatacgcgttgacatccctgggccacctctttcaggagcattacctgccgggtcctacagtcagttga

SEQ ID NO: 22711 - DNA, 122 bp, Homo sapiens
  misc_feature (61)..(62): /note="This region represents a CpG dinucleotide"
  misc_feature (61)..(61): /note="Nucleotide may be methylated to form 5-methylcytosine"
agtttcgcaacctaccagtaggcccggcaggtcccatctctcctttctggccaggggcaccgtcaaacccaggaatacctggaggtccaggtatacccaccaatcctgtaacacctgaggca

SEQ ID NO: 22712 - DNA, 122 bp, Homo sapiens
  misc_feature (61)..(62): /note="This region represents a CpG dinucleotide"
  misc_feature (61)..(61): /note="Nucleotide may be methylated to form 5-methylcytosine"
ggctcttgagggcaaggactgtggaaaggggagattttcacaatctcagtacctaggacacggccacacacccctggcctcgctgagtcttcaggatgtccctgcccaaggatgaggctagg

SEQ ID NO: 22713 - DNA, 122 bp, Homo sapiens
  misc_feature (61)..(62): /note="This region represents a CpG dinucleotide"
  misc_feature (61)..(61): /note="Nucleotide may be methylated to form 5-methylcytosine"
aggagtttcctccaacggtggtgggggtcagcttagctctttcagacaggattagaggagcgtatccaaagtgtgagagctacaaagaggaaaaaggagctctgagtgattttgacacagat

SEQ ID NO: 22714 - DNA, 122 bp, Homo sapiens
  misc_feature (61)..(62): /note="This region represents a CpG dinucleotide"
  misc_feature (61)..(61): /note="Nucleotide may be methylated to form 5-methylcytosine"
gtcacggcccccgtttacacaagagtaaagctgaggcctggagaaatccagtcacctgcccgagggccacacaactggtccggtgagggctgtgagtaaccctggatgtccctctgcagagt

SEQ ID NO: 22715 - DNA, 122 bp, Homo sapiens
  misc_feature (61)..(62): /note="This region represents a CpG dinucleotide"
  misc_feature (61)..(61): /note="Nucleotide may be methylated to form 5-methylcytosine"
tgggcgacagagccagactccatctcagaaaaaaaaaaaaaaaaaaaaaggagaaagcagcgaaaccacaaggactttctggatcttggcagtgggaaaagccagggtgttaaaggatgtgg

SEQ ID NO: 22716 - DNA, 122 bp, Homo sapiens
  misc_feature (61)..(62): /note="This region represents a CpG dinucleotide"
  misc_feature (61)..(61): /note="Nucleotide may be methylated to form 5-methylcytosine"
aggaagcccacctgtaaccacttagctgacatgtccaactatgggtgaacaggaaataagcgacattcacctaggctgtttattggaatctgactagcattatttgatttggcatactttac

SEQ ID NO: 22717 - DNA, 122 bp, Homo sapiens
  misc_feature (61)..(62): /note="This region represents a CpG dinucleotide"
  misc_feature (61)..(61): /note="Nucleotide may be methylated to form 5-methylcytosine"
cgggttaaactggaatattataaatgcaccatttatttgcagattgaaattctgtgcgtccggaggtggcgggtgggagagggaatgagcagggatgcagggtaggccctgagttgctgggg

SEQ ID NO: 22718 - DNA, 122 bp, Homo sapiens
  misc_feature (61)..(62): /note="This region represents a CpG dinucleotide"
  misc_feature (61)..(61): /note="Nucleotide may be methylated to form 5-methylcytosine"
ccagttgcacagctagtatttggcagaacctggatgcaaacctggctctgattccaaagccgaggcctcttggccctccagtctcccatttctcagcgcttcccttggggagttgcctctcc

SEQ ID NO: 22719 - DNA, 122 bp, Homo sapiens
  misc_feature (61)..(62): /note="This region represents a CpG dinucleotide"
  misc_feature (61)..(61): /note="Nucleotide may be methylated to form 5-methylcytosine"
gtcagaagctaacaagttctgtgatcctgggcaggaaccttcatgcaaattgtatctttacgggcctaactttgttgacccatgcctcaatttcatcacctgcaaaattagggttttgaacc

SEQ ID NO: 22720 - DNA, 122 bp, Homo sapiens
  misc_feature (61)..(62): /note="This region represents a CpG dinucleotide"
  misc_feature (61)..(61): /note="Nucleotide may be methylated to form 5-methylcytosine"
agtcatgacccctcagagtacagcacactagggtgcggaggcatagacacccttggccagcgctctctgagtgcctcagcagctcaagtgtgcggtggccttgggaagagctggtgggaaag

SEQ ID NO: 22721 - DNA, 122 bp, Homo sapiens
  misc_feature (61)..(62): /note="This region represents a CpG dinucleotide"
  misc_feature (61)..(61): /note="Nucleotide may be methylated to form 5-methylcytosine"
cattttccattcacttgctcattccacaattatttttagtgccaattatatgcaaagcaacgtggtaggtcctgtgaatgcagcaaacaatacaggcacagtctctgccttcaggttgttta

SEQ ID NO: 22722 - DNA, 122 bp, Homo sapiens
  misc_feature (61)..(62): /note="This region represents a CpG dinucleotide"
  misc_feature (61)..(61): /note="Nucleotide may be methylated to form 5-methylcytosine"
gatctggcctatctgtcactaaccactaccagttctagaaaacatgctaaataagaaatacgttccagagaaagatacagaggaatcagaggatttgacagataaaagagttctattattgc

SEQ ID NO: 22723 - DNA, 122 bp, Homo sapiens
  misc_feature (61)..(62): /note="This region represents a CpG dinucleotide"
  misc_feature (61)..(61): /note="Nucleotide may be methylated to form 5-methylcytosine"
agcagactcgcagcagggtgcccaccagagtggggacctgcagatgcccctgcccagagacgccgggaggccacagcccaggtcttccggatggagacagaacttcagcattccgtttggat

SEQ ID NO: 22724 - DNA, 122 bp, Homo sapiens
  misc_feature (61)..(62): /note="This region represents a CpG dinucleotide"
  misc_feature (61)..(61): /note="Nucleotide may be methylated to form 5-methylcytosine"
gtgccttgagtgccccgtgaagacttctctttaatgacctccaggtgtgttcctgccccacgcactcgggctgaacaaacgatccgcttcagaaaccccgcttctctgggcttctggcattt

SEQ ID NO: 22725 - DNA, 122 bp, Homo sapiens
  misc_feature (61)..(62): /note="This region represents a CpG dinucleotide"
  misc_feature (61)..(61): /note="Nucleotide may be methylated to form 5-methylcytosine"
actatagattattttatttaatccacacgagcacactatgaggcaggtacttattattgccgcttttcaaatgtggaaggtgaggcacacggcagttaaataacttgcctaggctcatactc

SEQ ID NO: 22726 - DNA, 122 bp, Homo sapiens
  misc_feature (61)..(62): /note="This region represents a CpG dinucleotide"
  misc_feature (61)..(61): /note="Nucleotide may be methylated to form 5-methylcytosine"
cttgaatttcaacaagcctccccactgtgggctaaagtgctctggggtactaaatcagctcgaaaggcagtctaagccaccaggacttcagttatgaggcaagtcctagtgctgaactgggc

SEQ ID NO: 22727 - DNA, 122 bp, Homo sapiens
  misc_feature (61)..(62): /note="This region represents a CpG dinucleotide"
  misc_feature (61)..(61): /note="Nucleotide may be methylated to form 5-methylcytosine"
atccctgcccagtttactgagtgccttttccatttgcatccactgtccattaggccaaggcgtttgaagtgtttctgtacagcaggtacatttaagactctccaggaagaaagggggaagaa

SEQ ID NO: 22728 - DNA, 122 bp, Homo sapiens
  misc_feature (61)..(62): /note="This region represents a CpG dinucleotide"
  misc_feature (61)..(61): /note="Nucleotide may be methylated to form 5-methylcytosine"
actctgtcccttggcagcagaacaccaaccagcctcccggctccctttccgtggtcaccacggtttggggagtaaccaacacatcccagagccaggtaagagcctatactgccctcagccac

SEQ ID NO: 22729 - DNA, 122 bp, Homo sapiens
  misc_feature (61)..(62): /note="This region represents a CpG dinucleotide"
  misc_feature (61)..(61): /note="Nucleotide may be methylated to form 5-methylcytosine"
atctgataaccaagatggctattaagtgactaacagacaggcagtgtatatagtgtgcagcgctggacaaagaaatgattcacatcctgggcaggacagagttggccagcatgagattttat

SEQ ID NO: 22730 - DNA, 122 bp, Homo sapiens
  misc_feature (61)..(62): /note="This region represents a CpG dinucleotide"
  misc_feature (61)..(61): /note="Nucleotide may be methylated to form 5-methylcytosine"
ttatggtgcatctgctagaacagggggcccacggtaccgtccatggcccgttaggatcggcgccacacagcagtaggtgcgcggcgagagttatcgcctgagctccgcctcctgctagatcc

SEQ ID NO: 22731 - DNA, 122 bp, Homo sapiens
  misc_feature (61)..(62): /note="This region represents a CpG dinucleotide"
  misc_feature (61)..(61): /note="Nucleotide may be methylated to form 5-methylcytosine"
cgatgtcttgggcatcctgccatggacaccttactcttcccccacaccctctccccgagtcgcctactttaatttcacccaaagagttctgcgagaagacataagagtgtggtgtgatgagg

SEQ ID NO: 22732 - DNA, 122 bp, Homo sapiens
  misc_feature (61)..(62): /note="This region represents a CpG dinucleotide"
  misc_feature (61)..(61): /note="Nucleotide may be methylated to form 5-methylcytosine"
taagctatttgagtgggttgtgggacaaaatgcagaatagtctaatcccagcttgggcatcgcgcagctccagaccctctgggcaagccctgtgcattcaacagcttttaggccacatccta

SEQ ID NO: 22733 - DNA, 122 bp, Homo sapiens
  misc_feature (61)..(62): /note="This region represents a CpG dinucleotide"
  misc_feature (61)..(61): /note="Nucleotide may be methylated to form 5-methylcytosine"
gcttgctttttgtctggcagtgcttgggtgcccacactggcagatgggtagtaagtgagccgattaaaggaaactcagtctcttcctgtttgaagcagtctgctaaggcttcactcagtctc

SEQ ID NO: 22734 - DNA, 122 bp, Homo sapiens
  misc_feature (61)..(62): /note="This region represents a CpG dinucleotide"
  misc_feature (61)..(61): /note="Nucleotide may be methylated to form 5-methylcytosine"
gctttggctttacttcccaggtgatttttctgttacgcttagcatgcatcgttgctgcttcgttgttttgttttgttttgttttgttttgttttgtttttttagatggagtctggcactgtc

SEQ ID NO: 22735 - DNA, 122 bp, Homo sapiens
  misc_feature (61)..(62): /note="This region represents a CpG dinucleotide"
  misc_feature (61)..(61): /note="Nucleotide may be methylated to form 5-methylcytosine"
agatgagggaagaatcaagactgatgataagattatttcaactcaacataccagtaaaaccggctccaagatcaagacagagaatatttccagccccgagaagctgccctggctctccttct

SEQ ID NO: 22736 - DNA, 122 bp, Homo sapiens
  misc_feature (61)..(62): /note="This region represents a CpG dinucleotide"
  misc_feature (61)..(61): /note="Nucleotide may be methylated to form 5-methylcytosine"
aagtaagaaatgttcacgtggaatagctgccattaatatgggtgacctcaaggttagtatcgctcagggaatgcctttcattgttctgtattgtttgtttcccttttgtgaaattctgtggc

SEQ ID NO: 22737 - DNA, 122 bp, Homo sapiens
  misc_feature (61)..(62): /note="This region represents a CpG dinucleotide"
  misc_feature (61)..(61): /note="Nucleotide may be methylated to form 5-methylcytosine"
accagtcatgccagaagctatgacgtgcttcatacactatcaaaactcaatactcaacaccgatttgttcagacccatgatcccaaggtgagaccactgacaattccattaattatctagtt

SEQ ID NO: 22738 - DNA, 122 bp, Homo sapiens
  misc_feature (61)..(62): /note="This region represents a CpG dinucleotide"
  misc_feature (61)..(61): /note="Nucleotide may be methylated to form 5-methylcytosine"
acttactatgagtcgcgtgatcctgggaacgtattcaacttccttacacttcacttttcacgtctgtaaggtgaagagaatagtagtgcttaactcataagtttgttgttagaattaaactc

SEQ ID NO: 22739 - DNA, 122 bp, Homo sapiens
  misc_feature (61)..(62): /note="This region represents a CpG dinucleotide"
  misc_feature (61)..(61): /note="Nucleotide may be methylated to form 5-methylcytosine"
tgctcaagtatatctaacaccttgcagctacaatatacatcaacatctccttagatggaacggagaaaggaaggttttttgcaggcaggtttgaagactaatcaatgctcggatctggaggt

SEQ ID NO: 22740 - DNA, 122 bp, Homo sapiens
  misc_feature (61)..(62): /note="This region represents a CpG dinucleotide"
  misc_feature (61)..(61): /note="Nucleotide may be methylated to form 5-methylcytosine"
gtctttaaaacaattccacactttttaaaggccagcactgtcagcaatccagaacaagaacgagtatgagtctagatatgaaagagacagccagttggtgaaatagctgtagccaagcccag

SEQ ID NO: 22741 - DNA, 122 bp, Homo sapiens
  misc_feature (61)..(62): /note="This region represents a CpG dinucleotide"
  misc_feature (61)..(61): /note="Nucleotide may be methylated to form 5-methylcytosine"
gacaggctttcctgtcctgcctgcctgccaaggaatgcagcaggcaagtcagatggggagcgggaagctctgggagccagctgccactcagcctccctcgccccctccttccatccccctgt

SEQ ID NO: 22742 - DNA, 122 bp, Homo sapiens
  misc_feature (61)..(62): /note="This region represents a CpG dinucleotide"
  misc_feature (61)..(61): /note="Nucleotide may be methylated to form 5-methylcytosine"
gaattaaagtaaacaaataaaactttttacagttgcttattaactatgctcttcaccctccgttacgctgtttcacacgcactgcttccctagagcaaagcacttggtatggaactgtttga

SEQ ID NO: 22743 - DNA, 122 bp, Homo sapiens
  misc_feature (61)..(62): /note="This region represents a CpG dinucleotide"
  misc_feature (61)..(61): /note="Nucleotide may be methylated to form 5-methylcytosine"
gctcccaacccatcctgtataccctgttctgtgtaaaccatattcctgctttgcctgctgcgccctgccaggctctgccaatagggggcgctagcgggaggttgccagactgaggagggaag

SEQ ID NO: 22744 - DNA, 122 bp, Homo sapiens
  misc_feature (61)..(62): /note="This region represents a CpG dinucleotide"
  misc_feature (61)..(61): /note="Nucleotide may be methylated to form 5-methylcytosine"
gtttggaaaaggataaaataccattcacacattcattaataaatatttgagggctttctacggtactaagtgctgtgaaggacaaaggtggctctaaagataaactagacatggaccttgcc

SEQ ID NO: 22745 - DNA, 122 bp, Homo sapiens
  misc_feature (61)..(62): /note="This region represents a CpG dinucleotide"
  misc_feature (61)..(61): /note="Nucleotide may be methylated to form 5-methylcytosine"
ttcactgaggtcttgtgtataagatttaattcctacttacttcatgggagaagtaagatgcgaagctgttattagtcacatttaccttggtgtgaataagtacccagctggcttggagaaag

SEQ ID NO: 22746 - DNA, 122 bp, Homo sapiens
  misc_feature (61)..(62): /note="This region represents a CpG dinucleotide"
  misc_feature (61)..(61): /note="Nucleotide may be methylated to form 5-methylcytosine"
cctcatggagggtggcaggttcctcttttaagtgttccaggctaggagttgcgtggttaacgctggggtaatacacactctgtatttgctaccacagccccccacccctagaagtctcccaa

SEQ ID NO: 22747 - DNA, 122 bp, Homo sapiens
  misc_feature (61)..(62): /note="This region represents a CpG dinucleotide"
  misc_feature (61)..(61): /note="Nucleotide may be methylated to form 5-methylcytosine"
atgatgaggcatatcaggaactatgtaatcttgtaatacttctgctgcaaaacctcctgacgttctgaatgaacagtcacatgcagcctcttcagtgcaaaactgagctcataagaaagtaa

SEQ ID NO: 22748 - DNA, 122 bp, Homo sapiens
  misc_feature (61)..(62): /note="This region represents a CpG dinucleotide"
  misc_feature (61)..(61): /note="Nucleotide may be methylated to form 5-methylcytosine"
gcgggtgcaagaactcccaggtcactgctttattcagaggacctaaggaattgggttgagcggaagcgcacagagctgcagattttctttgatgaatgaaagcttcaatccacaggtttcta

SEQ ID NO: 22749 - DNA, 122 bp, Homo sapiens
  misc_feature (61)..(62): /note="This region represents a CpG dinucleotide"
  misc_feature (61)..(61): /note="Nucleotide may be methylated to form 5-methylcytosine"
tatttcatctatgtaagataatgaccagtagagttggacatgtcccccgaacagggatgacgtgacgctgaaaaggagagttgagacctgccatcacatgaaggaagcaaagggaacaattc

SEQ ID NO: 22750 - DNA, 122 bp, Homo sapiens
  misc_feature (61)..(62): /note="This region represents a CpG dinucleotide"
  misc_feature (61)..(61): /note="Nucleotide may be methylated to form 5-methylcytosine"
atgggttttaacactctttctcattatgacttctcaagactagcctactaacccttgacacgcaactctaggtagagttgcaacacagttttccagcacagtgagacctgaataatccaggg

SEQ ID NO: 22751 - DNA, 122 bp, Homo sapiens
  misc_feature (61)..(62): /note="This region represents a CpG dinucleotide"
  misc_feature (61)..(61): /note="Nucleotide may be methylated to form 5-methylcytosine"
taggtggtgagaaggcacctgctttgaaatgctggtgccttgtctgtggtcctgtctgcccgccttctccttggcttcttagacttgctaaaccttgttacactctggcaggaagctctgag

SEQ ID NO: 22752 - DNA, 122 bp, Homo sapiens
  misc_feature (61)..(62): /note="This region represents a CpG dinucleotide"
  misc_feature (61)..(61): /note="Nucleotide may be methylated to form 5-methylcytosine"
gccgtaaacactgtgccattccgctaaaatactgtatgacatacttagagtagtcaatttcgtagagacaggaagtacaacagtggttgctgggggcgggggagagggaagaatgcagaact

SEQ ID NO: 22753 - DNA, 122 bp, Homo sapiens
  misc_feature (61)..(62): /note="This region represents a CpG dinucleotide"
  misc_feature (61)..(61): /note="Nucleotide may be methylated to form 5-methylcytosine"
tcattcttatgaggagtatatgtgtgtcagctacataacatgaaacttaaagcagtcatccgtggacatattgaaatagaatatctgctgttttcttccctactgttaaaatagtcctttca

SEQ ID NO: 22754 - DNA, 122 bp, Homo sapiens
  misc_feature (61)..(62): /note="This region represents a CpG dinucleotide"
  misc_feature (61)..(61): /note="Nucleotide may be methylated to form 5-methylcytosine"
ggagtcttttagtcctcaaagagtccttaagtctctctctctacttaattatagctatcacggaagagctggcttcatgtgaaaaatatggtcttcgctaagctttaaagtttctatccaaa

SEQ ID NO: 22755 - DNA, 122 bp, Homo sapiens
  misc_feature (61)..(62): /note="This region represents a CpG dinucleotide"
  misc_feature (61)..(61): /note="Nucleotide may be methylated to form 5-methylcytosine"
cgggacgcgcggggaggcggagctggagctgcagctgcggcccgcgcggggcgaggtcagcgcggggagcgaggggagctagggcagcggggaccccgggcccaggcccgggccgagctggg

SEQ ID NO: 22756 - DNA, 122 bp, Homo sapiens
  misc_feature (61)..(62): /note="This region represents a CpG dinucleotide"
  misc_feature (61)..(61): /note="Nucleotide may be methylated to form 5-methylcytosine"
tatattaattttcttgactctagtaaccattttaccacgcatatgtataccaaaacatcacgttgcacaccttaaatacatataatttttaaagcggagaaagtgttaagcctaaggtcaac

SEQ ID NO: 22757 - DNA, 122 bp, Homo sapiens
  misc_feature (61)..(62): /note="This region represents a CpG dinucleotide"
  misc_feature (61)..(61): /note="Nucleotide may be methylated to form 5-methylcytosine"
ctcctcttctgctcccttcacaacactgtcagagcaatggctatgttgaggagctgagctcgcgggtgctatatttaaccagtgttctcagcaagtcaagcctgtcaacagctgagaagttt

SEQ ID NO: 22758 - DNA, 122 bp, Homo sapiens
  misc_feature (61)..(62): /note="This region represents a CpG dinucleotide"
  misc_feature (61)..(61): /note="Nucleotide may be methylated to form 5-methylcytosine"
tcattgctggcaggaatgtaaaagagtacagccactgtggaaaccagtatggcagttcctcgaaaatgaaacacaggattatcctatgatccagcagttaagcaggtctcaatagggatttt

SEQ ID NO: 22759 - DNA, 122 bp, Homo sapiens
  misc_feature (61)..(62): /note="This region represents a CpG dinucleotide"
  misc_feature (61)..(61): /note="Nucleotide may be methylated to form 5-methylcytosine"
tccactcaaggactaggaactgaatctctgcacccttaaaaccactctcttagccgggcgcggtggctcatacctgtaatcccagcactttgggaggccaaggcaggtggatcacgaggtca

SEQ ID NO: 22760 - DNA, 122 bp, Homo sapiens
  misc_feature (61)..(62): /note="This region represents a CpG dinucleotide"
  misc_feature (61)..(61): /note="Nucleotide may be methylated to form 5-methylcytosine"
tattatatccattacatagtaacctgagaggttaatgtccatattacccaaggcaaaaaacgaatccagctcataagtagtggagcaaggatttaagcccaaatctgtctgactttgctatg

SEQ ID NO: 22761 - DNA, 122 bp, Homo sapiens
  misc_feature (61)..(62): /note="This region represents a CpG dinucleotide"
  misc_feature (61)..(61): /note="Nucleotide may be methylated to form 5-methylcytosine"
actgtccagatttgatagctggatgaaatctgtgaggcctctctccccagcaactgcagtcgctgtgctcagtttttcttccttgttttcatttatgcctgacttccttctagctgtcaccc

SEQ ID NO: 22762 - DNA, 122 bp, Homo sapiens
  misc_feature (61)..(62): /note="This region represents a CpG dinucleotide"
  misc_feature (61)..(61): /note="Nucleotide may be methylated to form 5-methylcytosine"
aaatctacagaatgaatgacctggtctcttcgacaaataaattgcagaggcacagccaggcgtggtgactcatgcctgtaatcttagcactctgggaggccgagggggcggatcacttgagg

SEQ ID NO: 22763 - DNA, 122 bp, Homo sapiens
  misc_feature (61)..(62): /note="This region represents a CpG dinucleotide"
  misc_feature (61)..(61): /note="Nucleotide may be methylated to form 5-methylcytosine"
ctagtcccagctccccagctcggcactggctctctccgctgcagtgggaggaggaggaggcgccaccaccgccacccgagccagaggggggcgaactggacagtttctgcttcttcaccccg

SEQ ID NO: 22764 - DNA, 122 bp, Homo sapiens
  misc_feature (61)..(62): /note="This region represents a CpG dinucleotide"
  misc_feature (61)..(61): /note="Nucleotide may be methylated to form 5-methylcytosine"
tcatcacagaaagctacagtcacaagtcaaattaactactgtatcacaattatcatattacgctacatacaccttactgactcagaatgtaacgtttcagaagaaaaacaagactggttgtt

SEQ ID NO: 22765 - DNA, 122 bp, Homo sapiens
  misc_feature (61)..(62): /note="This region represents a CpG dinucleotide"
  misc_feature (61)..(61): /note="Nucleotide may be methylated to form 5-methylcytosine"
ccctgtccgcgcagtcatgacctcactgctcatgcctgtgtttccccctccaaaccctagcgattcgttttggacgaatgccaagatctgagaaagcaaaactgaaagcagaaattcttacc

SEQ ID NO: 22766 - DNA, 122 bp, Homo sapiens
  misc_feature (61)..(62): /note="This region represents a CpG dinucleotide"
  misc_feature (61)..(61): /note="Nucleotide may be methylated to form 5-methylcytosine"
gggtaagctggtgttataatacgctgctgatctacatcacagatttgctaataatgttcacgtgggccctggcatatctctgttcagttagagtgagtgctgacccaacagcctctgtggtc

SEQ ID NO: 22767 - DNA, 122 bp, Homo sapiens
  misc_feature (61)..(62): /note="This region represents a CpG dinucleotide"
  misc_feature (61)..(61): /note="Nucleotide may be methylated to form 5-methylcytosine"
gcttcgctttttgtcctgtcttctaaattgtatccctcaattgatgacttgctctcttgccggtagcctctatgcactgtaaatttgccttctcaccacatcctccctatatgtttaaccct

SEQ ID NO: 22768 - DNA, 122 bp, Homo sapiens
  misc_feature (61)..(62): /note="This region represents a CpG dinucleotide"
  misc_feature (61)..(61): /note="Nucleotide may be methylated to form 5-methylcytosine"
aaaacatgaagctatacatacagtttctaaatttgttttgtataatgtcttcttcctccacgggtgtttcttcttgaagacggaattttgaaaagcttctgattcttctgttgcatcatcct

SEQ ID NO: 22769 - DNA, 122 bp, Homo sapiens
  misc_feature (61)..(62): /note="This region represents a CpG dinucleotide"
  misc_feature (61)..(61): /note="Nucleotide may be methylated to form 5-methylcytosine"
gctgctgagctttcctgattgtttcttgcacagccttgttgggacaatattaaaaagctgcggtgatttttaaatatactcacacatttttgagaatcctccctttaagaggtggagcctca

SEQ ID NO: 22770 - DNA, 122 bp, Homo sapiens
  misc_feature (61)..(62): /note="This region represents a CpG dinucleotide"
  misc_feature (61)..(61): /note="Nucleotide may be methylated to form 5-methylcytosine"
ctggaacttgcttgacagccagggagtgcctgccatggtaacacaggaacatgtagcctgcgcatgttagtgtaacaatcacacggcatccatgctagtcagttacacacagtcactcaaca

SEQ ID NO: 22771 - DNA, 122 bp, Homo sapiens
  misc_feature (61)..(62): /note="This region represents a CpG dinucleotide"
  misc_feature (61)..(61): /note="Nucleotide may be methylated to form 5-methylcytosine"
ctgctctacaaaccacaattgtttctcaaaaatcagcccctgccaggcacaggcaggtgacgatcctctagcactttataaaatgtgctgaagggaatcgccggaaaggaaggaattcaaag

SEQ ID NO: 22772 - DNA, 122 bp, Homo sapiens
  misc_feature (61)..(62): /note="This region represents a CpG dinucleotide"
  misc_feature (61)..(61): /note="Nucleotide may be methylated to form 5-methylcytosine"
aaaggtatccttaccctattttcattaacccagaagaaaacagagggtcaaagacaaaagcgatttgctcaaggtcacatggcttcaggaaacacactgccctggagctgggctcttctgac

SEQ ID NO: 22773 - DNA, 122 bp, Homo sapiens
  misc_feature (61)..(62): /note="This region represents a CpG dinucleotide"
  misc_feature (61)..(61): /note="Nucleotide may be methylated to form 5-methylcytosine"
tagtaactatcataatgtctaccagtatttattaagcacatattctgtgctgggtgtcgccgtttatatatgctctttcattttgtcctcaccacaactttatgaggcaggtcttgttagct

SEQ ID NO: 22774 - DNA, 122 bp, Homo sapiens
  misc_feature (61)..(62): /note="This region represents a CpG dinucleotide"
  misc_feature (61)..(61): /note="Nucleotide may be methylated to form 5-methylcytosine"
cttctggagtccgtcaggtgtgaagtgagcgctggagctgatgctcgctctgcttcagggcggttttcctggtgtgttcgcagtgtgacaggaaaatcaccttgcctggaaatggtccatat

SEQ ID NO: 22775 - DNA, 122 bp, Homo sapiens
  misc_feature (61)..(62): /note="This region represents a CpG dinucleotide"
  misc_feature (61)..(61): /note="Nucleotide may be methylated to form 5-methylcytosine"
ctgagcagaaggatagctgcctctggacctcaatacaaataattctccaggagtgagagccgtggttttgtggcttcctcaacctagccttcctcactgtctctgaagcctatctataaatg

SEQ ID NO: 22776 - DNA, 122 bp, Homo sapiens
  misc_feature (61)..(62): /note="This region represents a CpG dinucleotide"
  misc_feature (61)..(61): /note="Nucleotide may be methylated to form 5-methylcytosine"
tatttcagctgcaggtctgatctccataacagaagcacacctgaaaaatactgccttagccgctgaattttgatagagcaattctatattcctggtaacttcctctgtaattaatcgtcaat

SEQ ID NO: 22777 - DNA, 122 bp, Homo sapiens
  misc_feature (61)..(62): /note="This region represents a CpG dinucleotide"
  misc_feature (61)..(61): /note="Nucleotide may be methylated to form 5-methylcytosine"
ctaacagaaagaagctaatctgggagatcctcttgagtagattagccattccatgcaaaacgtcacagtggcaatcagaaaaggcatctctgaaatgtacaatgaagaaggacgttaaaaga

SEQ ID NO: 22778 - DNA, 122 bp, Homo sapiens
  misc_feature (61)..(62): /note="This region represents a CpG dinucleotide"
  misc_feature (61)..(61): /note="Nucleotide may be methylated to form 5-methylcytosine"
cgggaggtctggctggagtggagactgagtcatctgggactgcagggtccaacggagtcacgcctgtgagtgatgagcaccttgactgaggccaacgtcacagacgtgtctgggaagtgagt

SEQ ID NO: 22779 - DNA, 122 bp, Homo sapiens
  misc_feature (61)..(62): /note="This region represents a CpG dinucleotide"
  misc_feature (61)..(61): /note="Nucleotide may be methylated to form 5-methylcytosine"
gaccttctatttggaaaccagaacaaacaaggaaacaaagaaacaaataattctgctttccgataggtgctggttttacttccgctggctgagctgttgttcctgaggtcagaccccagcca

SEQ ID NO: 22780 - DNA, 122 bp, Homo sapiens
  misc_feature (61)..(62): /note="This region represents a CpG dinucleotide"
  misc_feature (61)..(61): /note="Nucleotide may be methylated to form 5-methylcytosine"
ggggtgctggattgctgagtggttaggagacccgctatggagccagacggcctgtgctcccgccatcccaactcgggcacctccctgctgtgtgatcttgggcaggttaattctcatctctg

SEQ ID NO: 22781 - DNA, 122 bp, Homo sapiens
  misc_feature (61)..(62): /note="This region represents a CpG dinucleotide"
  misc_feature (61)..(61): /note="Nucleotide may be methylated to form 5-methylcytosine"
aaatctggagccttgcaggttccctgacttcagacttactcactgcttgtgattctaatgcgtttctagtccacagagatgtttatctggttcttggaaacaaactataaacatttttatgt

SEQ ID NO: 22782 - DNA, 122 bp, Homo sapiens
  misc_feature (61)..(62): /note="This region represents a CpG dinucleotide"
  misc_feature (61)..(61): /note="Nucleotide may be methylated to form 5-methylcytosine"
gcctacctgtaaaaccctgaattctatatttgagatttgatcatttgtcacttgaggtaacggttttgggacaagaaagagaacaaagacgcgtgtgactcaggatgcagtctcctggggca

SEQ ID NO: 22783 - DNA, 122 bp, Homo sapiens
  misc_feature (61)..(62): /note="This region represents a CpG dinucleotide"
  misc_feature (61)..(61): /note="Nucleotide may be methylated to form 5-methylcytosine"
acctatggtctactgttgaaaacatgtacctccattactaaacagacagcagcatctccacgtatggtattagaatgaaatattaagaaaacattttgtaatagatgtactattttctgaca

SEQ ID NO: 22784 - DNA, 122 bp, Homo sapiens
  misc_feature (61)..(62): /note="This region represents a CpG dinucleotide"
  misc_feature (61)..(61): /note="Nucleotide may be methylated to form 5-methylcytosine"
tctctacaaatacgactgtggagaatggcagtcacttggaggtatggctttgtggtcagccgggcttactcactagctgagtgactctttatatccaggccattcagtgctttcatttcaaa

SEQ ID NO: 22785 - DNA, 122 bp, Homo sapiens
  misc_feature (61)..(62): /note="This region represents a CpG dinucleotide"
  misc_feature (61)..(61): /note="Nucleotide may be methylated to form 5-methylcytosine"
ttagcacataattgactctcagtacttctttgcaactggatggctgacttgaatcccaggcgaagaagccttggttttgttcagcatgtaaaagattatcactgaaaggttttgagtagggc

SEQ ID NO: 22786 - DNA, 122 bp, Homo sapiens
  misc_feature (61)..(62): /note="This region represents a CpG dinucleotide"
  misc_feature (61)..(61): /note="Nucleotide may be methylated to form 5-methylcytosine"
aggaaatctctcaaaggagcttcatgctctctgtgactcagggtagcagtatatggccttcggcacccactgtgggctgggctatggcagactttgcttgccctcattgctctctttgcttt

SEQ ID NO: 22787 - DNA, 122 bp, Homo sapiens
  misc_feature (61)..(62): /note="This region represents a CpG dinucleotide"
  misc_feature (61)..(61): /note="Nucleotide may be methylated to form 5-methylcytosine"
atgtatattccttacgtctattttcccagggactgactccttttaaataagcatctcaggcgggcgcggtggctcacacctgtaatcccagcactttgcagggcggaggtgggcggatcacc

SEQ ID NO: 22788 - DNA, 122 bp, Homo sapiens
  misc_feature (61)..(62): /note="This region represents a CpG dinucleotide"
  misc_feature (61)..(61): /note="Nucleotide may be methylated to form 5-methylcytosine"
acttacagcatgacacataaaggcctctgaggccaagtatacaccagctacatttcctgccgcactcatatttcatattttgccaccacatctttgttatacttctttgcctgaaaaagcct

SEQ ID NO: 22789 - DNA, 122 bp, Homo sapiens
  misc_feature (61)..(62): /note="This region represents a CpG dinucleotide"
  misc_feature (61)..(61): /note="Nucleotide may be methylated to form 5-methylcytosine"
tatgctgctcagcatcccacaatgcacggaagctgcctatgtacagaatatccaggatggcgcggtggctcatgcctataatcccagcactttggaaggccaaggcaggtggattacctgag

SEQ ID NO: 22790 - DNA, 122 bp, Homo sapiens
  misc_feature (61)..(62): /note="This region represents a CpG dinucleotide"
  misc_feature (61)..(61): /note="Nucleotide may be methylated to form 5-methylcytosine"
gtgatctttagcaagttacttaatacctctgaaactcaatgtttcacatcattcacatctcgatgaaaataataatacctacatcacaggattgttgtgagaagtaaatgaaacattatgtg

SEQ ID NO: 22791 - DNA, 122 bp, Homo sapiens
  misc_feature (61)..(62): /note="This region represents a CpG dinucleotide"
  misc_feature (61)..(61): /note="Nucleotide may be methylated to form 5-methylcytosine"
tcagtggaaaagaagaaagaagcaaaatcatgaaagcccactccattacttccaaggctacgcagtaaagggaactaactgctgagtcaccgtgggcctcattcctatcaggcttccattaa

SEQ ID NO: 22792 - DNA, 122 bp, Homo sapiens
  misc_feature (61)..(62): /note="This region represents a CpG dinucleotide"
  misc_feature (61)..(61): /note="Nucleotide may be methylated to form 5-methylcytosine"
aagttgttaatgtatgaataatactgacttacctcaaataagatgttcagattgagagtacgagatgagaagtctgagtcaacaaagtaaaatgtgatgggttatattagcaaaacaagtta

SEQ ID NO: 22793 - DNA, 122 bp, Homo sapiens
  misc_feature (61)..(62): /note="This region represents a CpG dinucleotide"
  misc_feature (61)..(61): /note="Nucleotide may be methylated to form 5-methylcytosine"
tgacaaaattgcctaatgatgcctttctcagaacggcattattcctgtcgttaagcaacacgtggctgtatcatataagttcttgactgtggcttgagtcttttgggcaatgtccagttggg

SEQ ID NO: 22794 - DNA, 122 bp, Homo sapiens
  misc_feature (61)..(62): /note="This region represents a CpG dinucleotide"
  misc_feature (61)..(61): /note="Nucleotide may be methylated to form 5-methylcytosine"
ggaatattgtacactatatggggttctttgtctggaggccacaaatccattgccataaaccgtaatggaattggttgcatcagcagctttaagaggccttgatcccatgaattcttaaattt

SEQ ID NO: 22795 - DNA, 122 bp, Homo sapiens
  misc_feature (61)..(62): /note="This region represents a CpG dinucleotide"
  misc_feature (61)..(61): /note="Nucleotide may be methylated to form 5-methylcytosine"
attaaatgaattaatacatataaaatgcttagaggagtgcccggcatatggtaagcccttcgtgtttgttagtcatcatttttttagttcctattatgtgccaaactttgtgctagactctt

SEQ ID NO: 22796 - DNA, 122 bp, Homo sapiens
  misc_feature (61)..(62): /note="This region represents a CpG dinucleotide"
  misc_feature (61)..(61): /note="Nucleotide may be methylated to form 5-methylcytosine"
cacctgtttcaaattctcactgtgggttttattgtcaagttctgatgtggctgaaggtgacggaatgatctggttgcttccaggagtctccttcaagaagtgctgattctgttaagaggaaa

SEQ ID NO: 22797 - DNA, 122 bp, Homo sapiens
  misc_feature (61)..(62): /note="This region represents a CpG dinucleotide"
  misc_feature (61)..(61): /note="Nucleotide may be methylated to form 5-methylcytosine"
tcttttctgcatctaactctcttcattcaagatccaggcgggaccgggtgcggtggctcacggctgtaatcccaacactttgggacccaaggctgaggcagtagggtcacttgaggtcagga

SEQ ID NO: 22798 - DNA, 122 bp, Homo sapiens
  misc_feature (61)..(62): /note="This region represents a CpG dinucleotide"
  misc_feature (61)..(61): /note="Nucleotide may be methylated to form 5-methylcytosine"
tccagtacaaggcaagtacaagttttaaaatagcctttcttggccgggcgctgtggctcacgcctgtaatccatatcctggccaacatggtgaaaccccgcctctactaaaaaaaaatacaa

SEQ ID NO: 22799 - DNA, 122 bp, Homo sapiens
  misc_feature (61)..(62): /note="This region represents a CpG dinucleotide"
  misc_feature (61)..(61): /note="Nucleotide may be methylated to form 5-methylcytosine"
aaaactctcaagaatagctgtacattttgtgtttcatgtttgcaggcttgttaatgcactcggtcataacaggaacacatcataccttttcttttattactcttcagttaccgcgcttgaat

SEQ ID NO: 22800 - DNA, 122 bp, Homo sapiens
  misc_feature (61)..(62): /note="This region represents a CpG dinucleotide"
  misc_feature (61)..(61): /note="Nucleotide may be methylated to form 5-methylcytosine"
aaccccatgctttcactgtgtacctaagagtgccttttacaagataggagctcaaaagtacgtgttgtttaaataatggaagctgttactaaatctgaatgtcaggtccttatcatttttag

SEQ ID NO: 22801 - DNA, 122 bp, Homo sapiens
  misc_feature (61)..(62): /note="This region represents a CpG dinucleotide"
  misc_feature (61)..(61): /note="Nucleotide may be methylated to form 5-methylcytosine"
aggtggagcagttgcagggctagcccctgctcacccaaatgaggtgactcagcagagaggcgaggtggtgtgagagctacaagtgactgctgcttgtagcagccttcttcatttctcacaag

SEQ ID NO: 22802 - DNA, 122 bp, Homo sapiens
  misc_feature (61)..(62): /note="This region represents a CpG dinucleotide"
  misc_feature (61)..(61): /note="Nucleotide may be methylated to form 5-methylcytosine"
tgcagcagctggtgagagctgtaggggcattcccagacacatttctcatgacatccttggcgctggtagcatggccagcaccaggccaggatctaaggacctggagggtcagagggccactg

SEQ ID NO: 22803 - DNA, 122 bp, Homo sapiens
  misc_feature (61)..(62): /note="This region represents a CpG dinucleotide"
  misc_feature (61)..(61): /note="Nucleotide may be methylated to form 5-methylcytosine"
accttcattttcgtccaaatactacaatttattttagagcagaattgtccaaaacacaaacgctagcaaatggcccgaagaacccacccagatcaacagtggaagctcgctctgccctgggc

SEQ ID NO: 22804 - DNA, 122 bp, Homo sapiens
  misc_feature (61)..(62): /note="This region represents a CpG dinucleotide"
  misc_feature (61)..(61): /note="Nucleotide may be methylated to form 5-methylcytosine"
agaggccctccatcgaggaagtgcattcacaacactttaatctgcaaaaccactcccccacgctgggggcaggtgctgctagcaccctgcaagttcaacaaaccaatcaaggtgagaggttc

SEQ ID NO: 22805 - DNA, 122 bp, Homo sapiens
  misc_feature (61)..(62): /note="This region represents a CpG dinucleotide"
  misc_feature (61)..(61): /note="Nucleotide may be methylated to form 5-methylcytosine"
ccaaaatagttcccaagccatgtttctatgctgctgtgatgctgggacagccaacacaggcgccgtttctcaaagaagaaacatgcatgtaaatcaggtttcacctgggcgggctgggccgg

SEQ ID NO: 22806 - DNA, 122 bp, Homo sapiens
  misc_feature (61)..(62): /note="This region represents a CpG dinucleotide"
  misc_feature (61)..(61): /note="Nucleotide may be methylated to form 5-methylcytosine"
cttcctcccgtccccgttggcggctggcaggctgtggtggtttcgggcagggaagggccccgcagtgtccctcctgtggccacacacactcctttattgctccagcgcccacctgctgcttg

SEQ ID NO: 22807 - DNA, 122 bp, Homo sapiens
  misc_feature (61)..(62): /note="This region represents a CpG dinucleotide"
  misc_feature (61)..(61): /note="Nucleotide may be methylated to form 5-methylcytosine"
aaaacatgtccctttttggaaggatagatggaaaacacattaggttggtgcaaaagtaaccgcagttattgccattaataagtaaaaaggagagtaaagacagaaaagggtaagcagtagta

SEQ ID NO: 22808 - DNA, 122 bp, Homo sapiens
  misc_feature (61)..(62): /note="This region represents a CpG dinucleotide"
  misc_feature (61)..(61): /note="Nucleotide may be methylated to form 5-methylcytosine"
atgcaggctgtactgaaagacaacaagtcacaggaagctgcctctcttacagggtggtgccgtcctgtggtttcccaccctcttggaggtgtagccattgtttgcttggtttcatgacacct

SEQ ID NO: 22809 - DNA, 122 bp, Homo sapiens
  misc_feature (61)..(62): /note="This region represents a CpG dinucleotide"
  misc_feature (61)..(61): /note="Nucleotide may be methylated to form 5-methylcytosine"
atttcttttcataggacactgaatgcatgttgatgttcttatttacagggattagatttacgtgaaacttgtcaggacaaaaagtctggcccatcattatttggagtgctctgtgcattcat

SEQ ID NO: 22810 - DNA, 122 bp, Homo sapiens
  misc_feature (61)..(62): /note="This region represents a CpG dinucleotide"
  misc_feature (61)..(61): /note="Nucleotide may be methylated to form 5-methylcytosine"
tgcaagagtttcaaagttctgtcacagatagaaatctccagctcttgactccagactaggcgccagctgataaacaaacaatttaagtcaagagctggagaattcccagctttttcatttaa

SEQ ID NO: 22811 - DNA, 122 bp, Homo sapiens
  misc_feature (61)..(62): /note="This region represents a CpG dinucleotide"
  misc_feature (61)..(61): /note="Nucleotide may be methylated to form 5-methylcytosine"
gttgcagtgagaggctgctttagggccctgaaaatctgaaaggatctcccagcatagtgtcgagaagaacaggaaagtgctgtttgcagagcaacttcactaagatgatgttccagatgaat

SEQ ID NO: 22812 - DNA, 122 bp, Homo sapiens
  misc_feature (61)..(62): /note="This region represents a CpG dinucleotide"
  misc_feature (61)..(61): /note="Nucleotide may be methylated to form 5-methylcytosine"
ccaggggactgatataaatcagccttcccagtgtcagtgtgtaacaacttcctgcgagggcgggaaaaaggaagtgtcctctcatgttggctctgcaattcataacctgtaagactcaagat

SEQ ID NO: 22813 - DNA, 122 bp, Homo sapiens
  misc_feature (61)..(62): /note="This region represents a CpG dinucleotide"
  misc_feature (61)..(61): /note="Nucleotide may be methylated to form 5-methylcytosine"
aattattagggacctggcagcgtgattggagtatggatgtttccgtaaaagctggaattccgtaaaagcattgacgcagcccctacactccatcccaaccaagaaactgcatttcctggggc

SEQ ID NO: 22814 - DNA, 122 bp, Homo sapiens
  misc_feature (61)..(62): /note="This region represents a CpG dinucleotide"
  misc_feature (61)..(61): /note="Nucleotide may be methylated to form 5-methylcytosine"
gtttctaacagcaggacttgcccaacaatggaatgggctgcttgtcacatgatgtacttccgtgcctttaccattgtttaagacaacttggaaaaaaaaaagccatgttcttacctgctaac

SEQ ID NO: 22815 - DNA, 122 bp, Homo sapiens
  misc_feature (61)..(62): /note="This region represents a CpG dinucleotide"
  misc_feature (61)..(61): /note="Nucleotide may be methylated to form 5-methylcytosine"
tacagcaggtgttgtcgtcacaatcctgggaaggaaataaggtacacaaaggttaagtaacgtctgatgtctcttgtctagtaagtagcagggatggacttaaacacagaccaatctcactc

SEQ ID NO: 22816 - DNA, 122 bp, Homo sapiens
  misc_feature (61)..(62): /note="This region represents a CpG dinucleotide"
  misc_feature (61)..(61): /note="Nucleotide may be methylated to form 5-methylcytosine"
ttaattaccagcacattaaccgtgtccagtactaaggaacccctcaatttactgactgtacgtgtgaaataaaggttgactcatagaagactaatactacaaaacacatgtgtaactcataa

SEQ ID NO: 22817 - DNA, 122 bp, Homo sapiens
  misc_feature (61)..(62): /note="This region represents a CpG dinucleotide"
  misc_feature (61)..(61): /note="Nucleotide may be methylated to form 5-methylcytosine"
gggtttgtgtacacagcgtggacgccacgcatccgtcaggtgaatctgaggttcttgtcccggccaaaatctaaaccaggcgcaggtgaggtcccctcaagcgcgtcaaaggggacccggct

SEQ ID NO: 22818 - DNA, 122 bp, Homo sapiens
  misc_feature (61)..(62): /note="This region represents a CpG dinucleotide"
  misc_feature (61)..(61): /note="Nucleotide may be methylated to form 5-methylcytosine"
gtgctttttttattgactgcagacagatgatcagttcctatgtttatcgcattaggacaccgttcttagcatagtttcatactcatggcacagagccaaccagcacaatttctataacatat

SEQ ID NO: 22819 - DNA, 122 bp, Homo sapiens
  misc_feature (61)..(62): /note="This region represents a CpG dinucleotide"
  misc_feature (61)..(61): /note="Nucleotide may be methylated to form 5-methylcytosine"
ggccgagagattttaaagcaggaatgaggctgagttctctgcggccggagcctcagttttcgactcgctacaaagttatgaacacactggcagccaagaagtatttatactcaccccatgcc

SEQ ID NO: 22820 - DNA, 122 bp, Homo sapiens
  misc_feature (61)..(62): /note="This region represents a CpG dinucleotide"
  misc_feature (61)..(61): /note="Nucleotide may be methylated to form 5-methylcytosine"
agacagccataggtgaaccgagctgcccagagtctcacactggtgaaagcagagctgggacgtaaacccagcctgtctgacctggagctcaggctcttacactctgcaagcattgtgcaagg

SEQ ID NO: 22821 - DNA, 122 bp, Homo sapiens
  misc_feature (61)..(62): /note="This region represents a CpG dinucleotide"
  misc_feature (61)..(61): /note="Nucleotide may be methylated to form 5-methylcytosine"
agagaatttaaaagcagatttgaatatacaattctcaaagcagaaaaccaaacagcaggccgagtgccatggctcacacctgtaatcccagcccttcaggaggctgaggcaagcagattgct

SEQ ID NO: 22822 - DNA, 122 bp, Homo sapiens
  misc_feature (61)..(62): /note="This region represents a CpG dinucleotide"
  misc_feature (61)..(61): /note="Nucleotide may be methylated to form 5-methylcytosine"
ttctggagctcttccaacctggacttctgactcaggctgtacagcaaatattcttgttttcgctgatttctctacatgtgaagaatctgagtggtttggatcccaaccatttagatggatga

SEQ ID NO: 22823 - DNA, 122 bp, Homo sapiens
  misc_feature (61)..(62): /note="This region represents a CpG dinucleotide"
  misc_feature (61)..(61): /note="Nucleotide may be methylated to form 5-methylcytosine"
atgaatcaaagcactcatccccacgcacagatagacataaatggtggtagctgtgggcatcgcggttgtggtcggctgtcatcttcacttcatcagagcgcccactggtgggtaatgagaga

SEQ ID NO: 22824 - DNA, 122 bp, Homo sapiens
  misc_feature (61)..(62): /note="This region represents a CpG dinucleotide"
  misc_feature (61)..(61): /note="Nucleotide may be methylated to form 5-methylcytosine"
gggacggtttttagtgtgttttccattcctggctctttaatctttgtaggcatacttctccgccttcccaccacccggattcatagtgtgaattcctgcccggccctgagtcatacccaggc

SEQ ID NO: 22825 - DNA, 122 bp, Homo sapiens
  misc_feature (61)..(62): /note="This region represents a CpG dinucleotide"
  misc_feature (61)..(61): /note="Nucleotide may be methylated to form 5-methylcytosine"
ctgaatcatagaacctcggggtgggaacagactaacccctctccaactccagcacagatgcgggaaggtggtgcaacttctgcccaatagcacagacagcaagcttctgagtcaggatggga

SEQ ID NO: 22826 - DNA, 122 bp, Homo sapiens
  misc_feature (61)..(62): /note="This region represents a CpG dinucleotide"
  misc_feature (61)..(61): /note="Nucleotide may be methylated to form 5-methylcytosine"
aagtgtcaacagtggcaaatgcaaccaagaagacaaataaggaaaaggctagaaagtttccgttgtatttaacaaccaagatgccattattgacctgggttgagagcaatttgagggagagg

SEQ ID NO: 22827 - DNA, 122 bp, Homo sapiens
  misc_feature (61)..(62): /note="This region represents a CpG dinucleotide"
  misc_feature (61)..(61): /note="Nucleotide may be methylated to form 5-methylcytosine"
ctaattttgctcccagtgttctcaactcttcaagcaccgtttttacagaaaggctaatggcgtttaaaagtttattgtctcagctggggtggtggctcacgcctgtaatcccagcactttgg

SEQ ID NO: 22828 - DNA, 122 bp, Homo sapiens
  misc_feature (61)..(62): /note="This region represents a CpG dinucleotide"
  misc_feature (61)..(61): /note="Nucleotide may be methylated to form 5-methylcytosine"
cacacacttcctggggttccttccagcgtgggcatctgtggttaggagtggacagtgggacgggagctcactgggacaagcagtgcctaagggcccgggccctaggtgcttagcacggcgcc

SEQ ID NO: 22829 - DNA, 122 bp, Homo sapiens
  misc_feature (61)..(62): /note="This region represents a CpG dinucleotide"
  misc_feature (61)..(61): /note="Nucleotide may be methylated to form 5-methylcytosine"
ctcattaaatcttgtttgcttttcaaaggaggaggaagagggaaaagacattgaagaaggcgctattgtgaatcctggtagagacagtgctacaaaccaaatcaggaaaaaggaaccccaga

SEQ ID NO: 22830 - DNA, 122 bp, Homo sapiens
  misc_feature (61)..(62): /note="This region represents a CpG dinucleotide"
  misc_feature (61)..(61): /note="Nucleotide may be methylated to form 5-methylcytosine"
ctgagacccgctcatcccctcctctgcaaactcaggcaccttcctaccctcctgacctgccggagtgcctgcctcttcaccaggtgcaactaactgggccacaacagttgctgcatgttccc

SEQ ID NO: 22831 - DNA, 122 bp, Homo sapiens
  misc_feature (61)..(62): /note="This region represents a CpG dinucleotide"
  misc_feature (61)..(61): /note="Nucleotide may be methylated to form 5-methylcytosine"
gaaccagcaaagcaagagaggagttgcaatggctagaattgtgtaacttgccttcagccacgtagccatggtggcagagctaggatttgaattcaagtctttgtgactcattgtcatgaggc

SEQ ID NO: 22832 - DNA, 122 bp, Homo sapiens
  misc_feature (61)..(62): /note="This region represents a CpG dinucleotide"
  misc_feature (61)..(61): /note="Nucleotide may be methylated to form 5-methylcytosine"
tcagtcttcatggtcatgtgacctgccctatctccaaaccacaaccttgggagctaaaggcgttcaaatcaaggacttcaccagagcctgtgaggtgggcagacagggtacgaatagcgccc

SEQ ID NO: 22833 - DNA, 122 bp, Homo sapiens
  misc_feature (61)..(62): /note="This region represents a CpG dinucleotide"
  misc_feature (61)..(61): /note="Nucleotide may be methylated to form 5-methylcytosine"
aaaacaaaaacaaaaacacaaaaagctgaacttctgcttgtgtttctcccttgcctgagccggaattgaatttagcctttgttttcccagatttggatgatgtatgagttccttaacaccca

SEQ ID NO: 22834 - DNA, 122 bp, Homo sapiens
  misc_feature (61)..(62): /note="This region represents a CpG dinucleotide"
  misc_feature (61)..(61): /note="Nucleotide may be methylated to form 5-methylcytosine"
aaggcaataggaagtgtgtcatcagaaggcacttggctgtttggatgactctctttgtgacgttagcagccattgatactcactacttagatggattaattcattggaggttgcaaaatagt

SEQ ID NO: 22835 - DNA, 122 bp, Homo sapiens
  misc_feature (61)..(62): /note="This region represents a CpG dinucleotide"
  misc_feature (61)..(61): /note="Nucleotide may be methylated to form 5-methylcytosine"
gccttggctggagaacttgggatgtcactctgctgcttacggtcacagagctcgagcaggcgctgtcacttgggccatgtgagccagtgactcattttaggatctggtcctgggcatctaag

SEQ ID NO: 22836 - DNA, 122 bp, Homo sapiens
  misc_feature (61)..(62): /note="This region represents a CpG dinucleotide"
  misc_feature (61)..(61): /note="Nucleotide may be methylated to form 5-methylcytosine"
ggttgaggtgaaagaaataaaatggtagtgtaaggagaaggaatacaagatggtagaagacgcagcagttgggtcagtaaacttgtaagaccttgagaggaaagttatcatcccccatttga

SEQ ID NO: 22837 - DNA, 122 bp, Homo sapiens
  misc_feature (61)..(62): /note="This region represents a CpG dinucleotide"
  misc_feature (61)..(61): /note="Nucleotide may be methylated to form 5-methylcytosine"
tgtggtccctggtcatttcttgtttgcatgctagtcaccttgttatccctaggcatataccgtcaggaaggagcattgtttggtgatgcgggccatcaggacaggttgcccagcctctgaac

SEQ ID NO: 22838 - DNA, 122 bp, Homo sapiens
  misc_feature (61)..(62): /note="This region represents a CpG dinucleotide"
  misc_feature (61)..(61): /note="Nucleotide may be methylated to form 5-methylcytosine"
gcaacttgatgagctgtttacagtcatcagctgcaaagacaaaaggttaagccaattgagcgcccagggatggacctacgtgttacaattgtgtgcactgcaggtgaacctgaagggtaggt

SEQ ID NO: 22839 - DNA, 122 bp, Homo sapiens
  misc_feature (61)..(62): /note="This region represents a CpG dinucleotide"
  misc_feature (61)..(61): /note="Nucleotide may be methylated to form 5-methylcytosine"
tgtgccgctttgtgtttgctgcataaacacgcactctccctcctcagctcacaggagtcacggggcagggagagcattctgcgctacttctgtaatcctacctggctcaggctggcctctga

SEQ ID NO: 22840 - DNA, 122 bp, Homo sapiens
  misc_feature (61)..(62): /note="This region represents a CpG dinucleotide"
  misc_feature (61)..(61): /note="Nucleotide may be methylated to form 5-methylcytosine"
ggcagccgggcgcaccctcgccagccctgctggagtttgctgtgggcactgaggcgcgggcgcccttccaaagcacatactcaccgaatgtttacagactggctgtcctggcagggctttca

SEQ ID NO: 22841 - DNA, 122 bp, Homo sapiens
  misc_feature (61)..(62): /note="This region represents a CpG dinucleotide"
  misc_feature (61)..(61): /note="Nucleotide may be methylated to form 5-methylcytosine"
gtgtgaacagagagcagggaaatgaatctcattctattcttttctgaaacaacaggaatacgaaccctcaccacccacctcgctgggatctgggaaggattaatgagacataatatgcagtg

SEQ ID NO: 22842 - DNA, 122 bp, Homo sapiens
  misc_feature (61)..(62): /note="This region represents a CpG dinucleotide"
  misc_feature (61)..(61): /note="Nucleotide may be methylated to form 5-methylcytosine"
gtgggagatttgtagcccaggtaggggggtgcccttgcctaacttggtggggctagaacccgagtactgatgcaaccaagctggtttcctactgcagctgcactctggctcccacagtttct

SEQ ID NO: 22843 - DNA, 122 bp, Homo sapiens
  misc_feature (61)..(62): /note="This region represents a CpG dinucleotide"
  misc_feature (61)..(61): /note="Nucleotide may be methylated to form 5-methylcytosine"
aatggtgttcttgttgacattcaagaggaaggccacaggccatatggagaggtatttaaccggcatggagctggtatccaggagggctgcagaatcctcttgaaccagtcgtgtggcggtcc

SEQ ID NO: 22844 - DNA, 122 bp, Homo sapiens
  misc_feature (61)..(62): /note="This region represents a CpG dinucleotide"
  misc_feature (61)..(61): /note="Nucleotide may be methylated to form 5-methylcytosine"
taaatttttgttgtgtggccccggaatctggggtagactctgtgactcacattactgtcacgtttccttgtctttcaagtgagaaagctagcagttaaagtgactcctagtagaagtccatc

SEQ ID NO: 22845 - DNA, 122 bp, Homo sapiens
  misc_feature (61)..(62): /note="This region represents a CpG dinucleotide"
  misc_feature (61)..(61): /note="Nucleotide may be methylated to form 5-methylcytosine"
aactttccacctcagttcccctaaatgaaatcaatgtctaaccacatgaccctcagttaccgaaagcattaccaaaaacaaaggcagattattagattgtggtgataactgtacaactctgt

SEQ ID NO: 22846 - DNA, 122 bp, Homo sapiens
  misc_feature (61)..(62): /note="This region represents a CpG dinucleotide"
  misc_feature (61)..(61): /note="Nucleotide may be methylated to form 5-methylcytosine"
aaatcgattcctctactatttcaggtaaattaatgatgagtctcaagatcacagctttttcggagcacatgtggtcctgggcgccacactacgctttaggaaattttctatttctttccttg

SEQ ID NO: 22847 - DNA, 122 bp, Homo sapiens
  misc_feature (61)..(62): /note="This region represents a CpG dinucleotide"
  misc_feature (61)..(61): /note="Nucleotide may be methylated to form 5-methylcytosine"
ggaaaactgcctactcaagcctcagcaatggtggacgccccgcccctgaccaagctcaagcgtcccaggtggacttcaggctgctgttctggcaatgagaatttcaagccagtggatcttag

SEQ ID NO: 22848 - DNA, 122 bp, Homo sapiens
  misc_feature (61)..(62): /note="This region represents a CpG dinucleotide"
  misc_feature (61)..(61): /note="Nucleotide may be methylated to form 5-methylcytosine"
acaataccattattgacaacaatgacaaacattcactaagtcgttagcagagttagtttacggtgtaaagggtgattcagaaactcatttgtcactagtggattccttgaactagtaacaaa

SEQ ID NO: 22849 - DNA, 122 bp, Homo sapiens
  misc_feature (61)..(62): /note="This region represents a CpG dinucleotide"
  misc_feature (61)..(61): /note="Nucleotide may be methylated to form 5-methylcytosine"
ttatatcccgctctttaaacttccccatgtatactcaatattatgtttcactacaaaagacgtatttttaaacatgaagaggcatccctgactctctctctcccttacatctggagaaaact

SEQ ID NO: 22850 - DNA, 122 bp, Homo sapiens
  misc_feature (61)..(62): /note="This region represents a CpG dinucleotide"
  misc_feature (61)..(61): /note="Nucleotide may be methylated to form 5-methylcytosine"
tctgacccagtcagtctcttctgtgcaaccacggtaatcttttgaaagtgcaagtccaatcgtgttttcccgaattaaaaagcttttgctggctgtacatcttcacagaatataccgaatga

SEQ ID NO: 22851 - DNA, 122 bp, Homo sapiens
  misc_feature (61)..(62): /note="This region represents a CpG dinucleotide"
  misc_feature (61)..(61): /note="Nucleotide may be methylated to form 5-methylcytosine"
tcctctctcttttatcttcttttattgcattttgggggcgaatagggggatattttaacccgggctccttgcctgttttcacagactctaagtcgtaaaactctgttacaaaggaaatgact

SEQ ID NO: 22852 - DNA, 122 bp, Homo sapiens
  misc_feature (61)..(62): /note="This region represents a CpG dinucleotide"
  misc_feature (61)..(61): /note="Nucleotide may be methylated to form 5-methylcytosine"
tgagtattaagcgacattcacttgcaaggctgtgttgtagtcagagctcagtcatgcagccgttactgtggctgctaaccgcttcagagtctccgggtaaggatttctcaatctagatcaaa

SEQ ID NO: 22853 - DNA, 122 bp, Homo sapiens
  misc_feature (61)..(62): /note="This region represents a CpG dinucleotide"
  misc_feature (61)..(61): /note="Nucleotide may be methylated to form 5-methylcytosine"
ttttttcccattaatcttagacgcaagctctagcttctgagatatctgagccagcattcacgtaaacaccccattctgtaggaatgaacagaaggaaaaggcagccggaacaaataacttcc

SEQ ID NO: 22854 - DNA, 122 bp, Homo sapiens
  misc_feature (61)..(62): /note="This region represents a CpG dinucleotide"
  misc_feature (61)..(61): /note="Nucleotide may be methylated to form 5-methylcytosine"
cttgggtattacgtaaccatgatgcgaatgactggtacaaatccaagtaacacttcaatacgtttgtaagggattataattgaaaagtcaccattcccctggaaccttaataataaaatgtt

SEQ ID NO: 22855 - DNA, 122 bp, Homo sapiens
  misc_feature (61)..(62): /note="This region represents a CpG dinucleotide"
  misc_feature (61)..(61): /note="Nucleotide may be methylated to form 5-methylcytosine"
gtgatctacccgcctctgccttccaaagtgctgggattacaggcgtgagccactgagccccgcctggcaaaggtttttaaaggaaaaaaacataattgttttgagataatgatccttggttg

SEQ ID NO: 22856 - DNA, 122 bp, Homo sapiens
  misc_feature (61)..(62): /note="This region represents a CpG dinucleotide"
  misc_feature (61)..(61): /note="Nucleotide may be methylated to form 5-methylcytosine"
attcacatcttcgaggctcgtctgtaagatggggataattcttccttcactggcttgttacgagtatgaatgtagaaaccactgtgaaagtgtaatattagcagcatcagatagaaaaaaga

SEQ ID NO: 22857 - DNA, 122 bp, Homo sapiens
  misc_feature (61)..(62): /note="This region represents a CpG dinucleotide"
  misc_feature (61)..(61): /note="Nucleotide may be methylated to form 5-methylcytosine"
gacgtcacactgaccacaaaagcttatatttcctgctactaaatacacagcccctgctgacgaagtgatcattacagagagagcttgttctgccgaggtcaccccaaagtggggatgaaggc

SEQ ID NO: 22858 - DNA, 122 bp, Homo sapiens
  misc_feature (61)..(62): /note="This region represents a CpG dinucleotide"
  misc_feature (61)..(61): /note="Nucleotide may be methylated to form 5-methylcytosine"
cagggaggagcaacagcttggcttatttttttctttttcttttttttttaagcacactcacgaaagtgatggttggaaaaatattgtagatgcctgctctacatcagtaaataattctatat

SEQ ID NO: 22859 - DNA, 122 bp, Homo sapiens
  misc_feature (61)..(62): /note="This region represents a CpG dinucleotide"
  misc_feature (61)..(61): /note="Nucleotide may be methylated to form 5-methylcytosine"
ggaaacagaccaacagctgcttggcctccatcaggaaggccaagcggacaaaggagcacacgcccagggaggctccgggtccccaacttaaaagggccttgacaaataacagctgttcctgt

SEQ ID NO: 22860 - DNA, 122 bp, Homo sapiens
  misc_feature (61)..(62): /note="This region represents a CpG dinucleotide"
  misc_feature (61)..(61): /note="Nucleotide may be methylated to form 5-methylcytosine"
aaactcattcatctcctgactttattcttgtattcagttccttcactgatttctttctgccgcaattctttcactgatttccaaatatgggataattttaaagaagcaattggtcatgacaa

SEQ ID NO: 22861 - DNA, 122 bp, Homo sapiens
  misc_feature (61)..(62): /note="This region represents a CpG dinucleotide"
  misc_feature (61)..(61): /note="Nucleotide may be methylated to form 5-methylcytosine"
tgtagcctaaacattggcttttaatattcatcctcatgtcttactctctccttgcttcctcgtactggatggtgactgtgtgaatggacagaagggtttggcagagctttgctggtaccact

SEQ ID NO: 22862 - DNA, 122 bp, Homo sapiens
  misc_feature (61)..(62): /note="This region represents a CpG dinucleotide"
  misc_feature (61)..(61): /note="Nucleotide may be methylated to form 5-methylcytosine"
tggtttctgcagatccatgtgctctaaggtgatgactaacccgttagcagggctggcagccgcctctgtgacacagaagggtggcatcactgagtttcgatttagctgagacagaacaccca

SEQ ID NO: 22863 - DNA, 122 bp, Homo sapiens
  misc_feature (61)..(62): /note="This region represents a CpG dinucleotide"
  misc_feature (61)..(61): /note="Nucleotide may be methylated to form 5-methylcytosine"
tttgtcttactagttaaatcctcacctaatctcttgggtatgaatataaatgtgtgtcatcgttatattgttcagctagatgagcaagtatcttagggtagtaggtagcctggtggttttag

SEQ ID NO: 22864 - DNA, 122 bp, Homo sapiens
  misc_feature (61)..(62): /note="This region represents a CpG dinucleotide"
  misc_feature (61)..(61): /note="Nucleotide may be methylated to form 5-methylcytosine"
acctcccaaagtgctgagtttacaggtgtgagccatagggcctggccaagtttctaattacgtaagagaatttaagatctctgattggaacagactttaaaggcatctagttgaattattta

SEQ ID NO: 22865 - DNA, 122 bp, Homo sapiens
  misc_feature (61)..(62): /note="This region represents a CpG dinucleotide"
  misc_feature (61)..(61): /note="Nucleotide may be methylated to form 5-methylcytosine"
gaacacgtagctttgctaagagaagcatgaaatgtgagtagccacaaaccttaacaatcacgagaaccaacagcaaggaacagatagcaagtattcacaggagaccgtggatagggtcccat

SEQ ID NO: 22866 - DNA, 122 bp, Homo sapiens
  misc_feature (61)..(62): /note="This region represents a CpG dinucleotide"
  misc_feature (61)..(61): /note="Nucleotide may be methylated to form 5-methylcytosine"
taaggcctgtgggactcttcctttcctagatgaaaaccttctaactgttgctaatttttccgtaggttgcccatcctcctggctatcctttgttcacgctggtggctaaactggcaattaca

SEQ ID NO: 22867 - DNA, 122 bp, Homo sapiens
  misc_feature (61)..(62): /note="This region represents a CpG dinucleotide"
  misc_feature (61)..(61): /note="Nucleotide may be methylated to form 5-methylcytosine"
gattccacaggataatggcaccaagctacccaagtagatgtttctggtattctagactgccgttcatgcttgtttcctaaagtatacttaaaagtttcaaatacagtttcacttagaaactg

SEQ ID NO: 22868 - DNA, 122 bp, Homo sapiens
  misc_feature (61)..(62): /note="This region represents a CpG dinucleotide"
  misc_feature (61)..(61): /note="Nucleotide may be methylated to form 5-methylcytosine"
gcctagaaagaaatgcaaggtgtgtgtagattcgttgaccttttgctgtttgcccagctgcggggtgactcccttttcatttcccagctgctcagctgcttcctactgctattttattttgc

SEQ ID NO: 22869 - DNA, 122 bp, Homo sapiens
  misc_feature (61)..(62): /note="This region represents a CpG dinucleotide"
  misc_feature (61)..(61): /note="Nucleotide may be methylated to form 5-methylcytosine"
atggtaccaggaaactagcagtgtaactctctgatgtgagataacatcataagttcctgccgcaccaaattactgctgccataaattcctctcaggcttcagaacactcttttattacactg

SEQ ID NO: 22870 - DNA, 122 bp, Homo sapiens
  misc_feature (61)..(62): /note="This region represents a CpG dinucleotide"
  misc_feature (61)..(61): /note="Nucleotide may be methylated to form 5-methylcytosine"
gcagtgtatgagatttccaggcacttcccttctggctaatgtttggttttgtcagccttgcgaattttaattgttttggggatatatagtaataactcaaagttttagtttgcatttttctg

SEQ ID NO: 22871 - DNA, 122 bp, Homo sapiens
  misc_feature (61)..(62): /note="This region represents a CpG dinucleotide"
  misc_feature (61)..(61): /note="Nucleotide may be methylated to form 5-methylcytosine"
tctcttttcccagctgtcagagacttgactgcgtgctgcaaaacaagtcatactactgtgcgcaaagagtcagtgggcagcaggcgaggcctcgagagacttccctaggcatctcagggtgt

SEQ ID NO: 22872 - DNA, 122 bp, Homo sapiens
  misc_feature (61)..(62): /note="This region represents a CpG dinucleotide"
  misc_feature (61)..(61): /note="Nucleotide may be methylated to form 5-methylcytosine"
ctccgtgggtccccaagaaaggcagccctgctgggggcagtgaagcccttatccaggtcacgtgagtcttggaaggggaaggctgctgtgcttaacgattcaaaaacacaaatcaaacctcc

SEQ ID NO: 22873 - DNA, 122 bp, Homo sapiens
  misc_feature (61)..(62): /note="This region represents a CpG dinucleotide"
  misc_feature (61)..(61): /note="Nucleotide may be methylated to form 5-methylcytosine"
tgtgcaggcagcctgagaaacagaagatggtgggcgagaggaggactgactaggaaagggcgaacatcttcctgcctggccactcctttcagaaacagatctgatgctgtcacttgtttact

SEQ ID NO: 22874 - DNA, 122 bp, Homo sapiens
  misc_feature (61)..(62): /note="This region represents a CpG dinucleotide"
  misc_feature (61)..(61): /note="Nucleotide may be methylated to form 5-methylcytosine"
ttggctggcctacctgctacagaagctgaggctcagctggcctgccaatgggcttgagcccgtggggatctgtgactgtaccatgactcactgaccctgcaaaagccaaactggctccgttg

SEQ ID NO: 22875 - DNA, 122 bp, Homo sapiens
  misc_feature (61)..(62): /note="This region represents a CpG dinucleotide"
  misc_feature (61)..(61): /note="Nucleotide may be methylated to form 5-methylcytosine"
acaaattgcgctgcattatgtctgaatcatgttctgtgacaagtcatattacaagtggtacggttatattatgcaatgtatgtgataatgtgtgagaacaaacgaagcaggctacgtaaaag

SEQ ID NO: 22876 - DNA, 122 bp, Homo sapiens
  misc_feature (61)..(62): /note="This region represents a CpG dinucleotide"
  misc_feature (61)..(61): /note="Nucleotide may be methylated to form 5-methylcytosine"
agtcccgtctgggagtgacaggagacagtgacagataatcaggcattagactctcataagcgcacaccctagatccctcagatgcacagttcacaatagggtttgagctcctatgagaagct

SEQ ID NO: 22877 - DNA, 122 bp, Homo sapiens
  misc_feature (61)..(62): /note="This region represents a CpG dinucleotide"
  misc_feature (61)..(61): /note="Nucleotide may be methylated to form 5-methylcytosine"
catagggcaagacagccacagaggggcgtttgaggaattctgtgcaccatgctctctttccgttatttctgaatcaccagtaaagctcattaaaagttacagactaatactttcggctatgc

SEQ ID NO: 22878 - DNA, 122 bp, Homo sapiens
  misc_feature (61)..(62): /note="This region represents a CpG dinucleotide"
  misc_feature (61)..(61): /note="Nucleotide may be methylated to form 5-methylcytosine"
aggccttgtcatcgataacaggatgaatactgagggccatcagcccatgagttctttgctcgtctatcctagaaaaaggaatgttttcaaatacctccactatcaatcaccaagaaaaaaac

SEQ ID NO: 22879 - DNA, 122 bp, Homo sapiens
  misc_feature (61)..(62): /note="This region represents a CpG dinucleotide"
  misc_feature (61)..(61): /note="Nucleotide may be methylated to form 5-methylcytosine"
acgctgtgggtctggccggaacctctttcctttgtgcacctgtgcccagcccatgcacaacgcagagctgacaccaagtgagcatctgtcactaagtgaggcaggcaaatgaggtaacactc

SEQ ID NO: 22880 - DNA, 122 bp, Homo sapiens
  misc_feature (61)..(62): /note="This region represents a CpG dinucleotide"
  misc_feature (61)..(61): /note="Nucleotide may be methylated to form 5-methylcytosine"
ccctcgccttatttcaaaaaaactagcaaggggtggattcgacatttttcctacttcctacgtatcaggctctcaggagctttatgcacattgttttattgaatcctcagaacttctcaggc

SEQ ID NO: 22881 - DNA, 122 bp, Homo sapiens
  misc_feature (61)..(62): /note="This region represents a CpG dinucleotide"
  misc_feature (61)..(61): /note="Nucleotide may be methylated to form 5-methylcytosine"
tggttggaacgaagcaaaataacatttctgagtgcctgctaaggtccagcacttttcacacgtaaaattttcacaacaatccctgtgagttgggatccagtttctacagatgaggaaatgaa

SEQ ID NO: 22882 - DNA, 122 bp, Homo sapiens
  misc_feature (61)..(62): /note="This region represents a CpG dinucleotide"
  misc_feature (61)..(61): /note="Nucleotide may be methylated to form 5-methylcytosine"
gaccccgttgagccggtctcatttgatcttttcttcttctgggtggctgtactaagcggtcgggtttccccgggaatttgatggttcctatagtctgcctgtgtcggaggcttctttggttt

SEQ ID NO: 22883 - DNA, 122 bp, Homo sapiens
  misc_feature (61)..(62): /note="This region represents a CpG dinucleotide"
  misc_feature (61)..(61): /note="Nucleotide may be methylated to form 5-methylcytosine"
gggcaggaattgacttactcaatttccttcatatctggccctggctcttgggccagaaaccgcacacaggagttgaagaaaaactgtgtatcaacaatttttttcttgtctttatcaaaaga

SEQ ID NO: 22884 - DNA, 122 bp, Homo sapiens
  misc_feature (61)..(62): /note="This region represents a CpG dinucleotide"
  misc_feature (61)..(61): /note="Nucleotide may be methylated to form 5-methylcytosine"
agaaatcttctctgtcatccacagacctttgtcatacacacataccttgatactactccccgcttgcactcccagatggtgggaacagggcacacccatgcctgcagccatacctgcactgg

SEQ ID NO: 22885 - DNA, 122 bp, Homo sapiens
  misc_feature (61)..(62): /note="This region represents a CpG dinucleotide"
  misc_feature (61)..(61): /note="Nucleotide may be methylated to form 5-methylcytosine"
gaatgtgcctggatccctatgggccttggctttctaccagatgacaggcaaactaagagacgtacacaacctatgcactcccttccctctagaatgtttcagcaggggtcctctaagtaaga

SEQ ID NO: 22886 - DNA, 122 bp, Homo sapiens
  misc_feature (61)..(62): /note="This region represents a CpG dinucleotide"
  misc_feature (61)..(61): /note="Nucleotide may be methylated to form 5-methylcytosine"
agactactctgtttcataacaggaagaatagtcataaatgttgtgataatccagtttttacgtgaagtgtgaaaatcctgaattagcatggtgtctgtagtaacaggagagaaaggatgcaa

SEQ ID NO: 22887 - DNA, 122 bp, Homo sapiens
  misc_feature (61)..(62): /note="This region represents a CpG dinucleotide"
  misc_feature (61)..(61): /note="Nucleotide may be methylated to form 5-methylcytosine"
atagtctcactgaacactattgcttgttaatgttcagacactaatagcactggaaagagtcgttccttgtgtcaactcatcaagtagtctaaacaagcctgttggaggctggccagttctgg

SEQ ID NO: 22888 - DNA, 122 bp, Homo sapiens
  misc_feature (61)..(62): /note="This region represents a CpG dinucleotide"
  misc_feature (61)..(61): /note="Nucleotide may be methylated to form 5-methylcytosine"
agaaagcaaacagagaagaaacttgtcacatttactttcttcctgatttctttaagtcctcgtcatcatttcaagactaagctttgctatattcactgcattccatttttttttctaacctg

SEQ ID NO: 22889 - DNA, 122 bp, Homo sapiens
  misc_feature (61)..(62): /note="This region represents a CpG dinucleotide"
  misc_feature (61)..(61): /note="Nucleotide may be methylated to form 5-methylcytosine"
cctgtgccttgagaacttcgggactgtctagaactgcccagtcccctcatcaaaggtggccgagagattttaaagcaggaatgaggctgagttctctgcggccggagcctcagttttcgact

SEQ ID NO: 22890 - DNA, 122 bp, Homo sapiens
  misc_feature (61)..(62): /note="This region represents a CpG dinucleotide"
  misc_feature (61)..(61): /note="Nucleotide may be methylated to form 5-methylcytosine"
ctcctcctcataaacacaccacacccttatttagttcaagagtgcttaatcaggaaataacgaaattgtgagtaataagtcatattatcagtgtgataggggagtgataagtacacattgag

SEQ ID NO: 22891 - DNA, 122 bp, Homo sapiens
  misc_feature (61)..(62): /note="This region represents a CpG dinucleotide"
  misc_feature (61)..(61): /note="Nucleotide may be methylated to form 5-methylcytosine"
gagcacactgtgtggttctagatacacaccacatagtgaaacagacttggtccctgccctcgtggaccttacaaccccatgatgaaggccacataacaagaaacttctctggacacacattt

SEQ ID NO: 22892 - DNA, 122 bp, Homo sapiens
  misc_feature (61)..(62): /note="This region represents a CpG dinucleotide"
  misc_feature (61)..(61): /note="Nucleotide may be methylated to form 5-methylcytosine"
agagggtttcctgcccactcctactcccacctccttgctcagctcacagtcacccaagcacgcacacacagctctgccatgctcctgtgtgcagtttgcaaggtattaaaccctcagagcca

SEQ ID NO: 22893 - DNA, 122 bp, Homo sapiens
  misc_feature (61)..(62): /note="This region represents a CpG dinucleotide"
  misc_feature (61)..(61): /note="Nucleotide may be methylated to form 5-methylcytosine"
tggaagtttcactgaagtatcagtgttgactttctcaggtcaaatctgggccatttcatgcggtaaatccatgtcggcaggtatcagcccaagtgttttgaacatgctgcacttgtacatgc

SEQ ID NO: 22894 - DNA, 122 bp, Homo sapiens
  misc_feature (61)..(62): /note="This region represents a CpG dinucleotide"
  misc_feature (61)..(61): /note="Nucleotide may be methylated to form 5-methylcytosine"
tttggctacagtcaagtggttattgtctgaaaggttttagtcttgctaggcttcctctttcgtggtcattttggtaaagagagcagacttttgttggggcttttttggttggcttccattgg

SEQ ID NO: 22895 - DNA, 122 bp, Homo sapiens
  misc_feature (61)..(62): /note="This region represents a CpG dinucleotide"
  misc_feature (61)..(61): /note="Nucleotide may be methylated to form 5-methylcytosine"
actattaccagaaaaatcaaaaagcagtgttccagagaacagttttacacatattgtaaacgttttgttatctggcatgttaggaagctagaagaatcagttctagaattcttaataacttc

SEQ ID NO: 22896 - DNA, 122 bp, Homo sapiens
  misc_feature (61)..(62): /note="This region represents a CpG dinucleotide"
  misc_feature (61)..(61): /note="Nucleotide may be methylated to form 5-methylcytosine"
tgtccatttccttgagtttctctgttatcttcattacttccttccttgtacttgcttcagcgcattagtcagggcccagtcaggaaacaaaaaccacaccggcaatttgaatagcaacttgt

SEQ ID NO: 22897 - DNA, 122 bp, Homo sapiens
  misc_feature (61)..(62): /note="This region represents a CpG dinucleotide"
  misc_feature (61)..(61): /note="Nucleotide may be methylated to form 5-methylcytosine"
taaatgtctgagagagaaactttaactacagcctactgtttatcctttctcctggcagctcgaagattacctgagaggttttcatctgcataacaagacagcctttgcttggcatgccttcc

SEQ ID NO: 22898 - DNA, 122 bp, Homo sapiens
  misc_feature (61)..(62): /note="This region represents a CpG dinucleotide"
  misc_feature (61)..(61): /note="Nucleotide may be methylated to form 5-methylcytosine"
tatacagatttagagcctaggaacagttggctataccatatatcctaggggtgtagcaggcgctactatctagttgtgtgtgagtagtcactctgatgtttgcacaatgatgaaataggcta

SEQ ID NO: 22899 - DNA, 122 bp, Homo sapiens
  misc_feature (61)..(62): /note="This region represents a CpG dinucleotide"
  misc_feature (61)..(61): /note="Nucleotide may be methylated to form 5-methylcytosine"
ccttgcaagccctccgcagtcagcgctgcccaggaaaggactcagggaacaaactcctgacgtcctgggcttgggatcatctcagcccaggccctgcaggtacagatggggagactaaagca

SEQ ID NO: 22900 - DNA, 122 bp, Homo sapiens
  misc_feature (61)..(62): /note="This region represents a CpG dinucleotide"
  misc_feature (61)..(61): /note="Nucleotide may be methylated to form 5-methylcytosine"
ccaccacgcccagccggcaccttagacttttaagttcaaggtcacaacattgtaggtggccgtgattcagaggtcaggaagctgctgctcttgccacaacagattcccgcacccaggtaggt

SEQ ID NO: 22901 - DNA, 122 bp, Homo sapiens
  misc_feature (61)..(62): /note="This region represents a CpG dinucleotide"
  misc_feature (61)..(61): /note="Nucleotide may be methylated to form 5-methylcytosine"
tgaatgtattccaaagctagcttggaggaggggcacacaacgtcctgcctttcaatgtgccgcttcccctttggagcagaaagcaggcacttttataaggtaagggagcaagtgagcaaggg

SEQ ID NO: 22902 - DNA, 122 bp, Homo sapiens
  misc_feature (61)..(62): /note="This region represents a CpG dinucleotide"
  misc_feature (61)..(61): /note="Nucleotide may be methylated to form 5-methylcytosine"
cgacctcatgattcaccctcttcagcctcccaaagtgctgggattacgggcatgagccaccgtgcctggcctgtttttactattaactcattattgtgatagttgacaacaatgaaaaatac

SEQ ID NO: 22903 - DNA, 122 bp, Homo sapiens
  misc_feature (61)..(62): /note="This region represents a CpG dinucleotide"
  misc_feature (61)..(61): /note="Nucleotide may be methylated to form 5-methylcytosine"
tttacttaattgagttactgaatggttgattgagagcaatggttctgcaggattagtaaacgctgataaaggcctgttgactatgcatgtatagatgtgtaagttcagagctacattatcag

SEQ ID NO: 22904 - DNA, 122 bp, Homo sapiens
  misc_feature (61)..(62): /note="This region represents a CpG dinucleotide"
  misc_feature (61)..(61): /note="Nucleotide may be methylated to form 5-methylcytosine"
gaacccctcaaggacagggaatgggtctcattcatccaggagcttctaacacccgacacacgcagacactcagtaaacagtaagtgaattagtagaaccaaggaaataagaaccgaccctat

SEQ ID NO: 22905 - DNA, 122 bp, Homo sapiens
  misc_feature (61)..(62): /note="This region represents a CpG dinucleotide"
  misc_feature (61)..(61): /note="Nucleotide may be methylated to form 5-methylcytosine"
aggacaaggagttttccagagaagaaggaccttcgaggcagaggacacattagatccagacggtcttcaccaactgtgaggatactactctgcccagcccaagatgattgagtcactcctac

SEQ ID NO: 22906 - DNA, 122 bp, Homo sapiens
  misc_feature (61)..(62): /note="This region represents a CpG dinucleotide"
  misc_feature (61)..(61): /note="Nucleotide may be methylated to form 5-methylcytosine"
acgtgaggagaaaaacaataacaggaaccaacaatgatatgaacatggtgatgagtcatccgccaacccttgctgattgacgtcagaccagccacaaagggtgttttacaagttaaggacaa

SEQ ID NO: 22907 - DNA, 122 bp, Homo sapiens
  misc_feature (61)..(62): /note="This region represents a CpG dinucleotide"
  misc_feature (61)..(61): /note="Nucleotide may be methylated to form 5-methylcytosine"
taaaaaagccatgcattattaacaagacatttggcatcaaagcagaatgatttggaaaaccggaaaatgtccgcagaataagagaaaggggagctaacagcttaaattatttttggtagtgt

SEQ ID NO: 22908 - DNA, 122 bp, Homo sapiens
  misc_feature (61)..(62): /note="This region represents a CpG dinucleotide"
  misc_feature (61)..(61): /note="Nucleotide may be methylated to form 5-methylcytosine"
gcagcttccggaagcaggtactgacctggtggctccacctggagccactgcccgagcctgcgaggtcaccaacagcctccgcaagatttccacacgtgtggctctccactgctcagggggca

SEQ ID NO: 22909 - DNA, 122 bp, Homo sapiens
  misc_feature (61)..(62): /note="This region represents a CpG dinucleotide"
  misc_feature (61)..(61): /note="Nucleotide may be methylated to form 5-methylcytosine"
cgcccagagtgagctgctcactctgtctgtagggaggtgtcacagcagaaaccgccagatcgctgcccgattcaactcccagtagctatgctgtcacataagaaaactgcccagaggctggg

SEQ ID NO: 22910 - DNA, 122 bp, Homo sapiens
  misc_feature (61)..(62): /note="This region represents a CpG dinucleotide"
  misc_feature (61)..(61): /note="Nucleotide may be methylated to form 5-methylcytosine"
tgtagaatggagaggacaaatgtcaatggcttctgaagaatatgtgtcctggagtcactacgtgatgagaattaccacctgtgccatttattggctttatgagtttggatatgtctcttctt

SEQ ID NO: 22911 - DNA, 122 bp, Homo sapiens
  misc_feature (61)..(62): /note="This region represents a CpG dinucleotide"
  misc_feature (61)..(61): /note="Nucleotide may be methylated to form 5-methylcytosine"
cagggcgtcttcttggggtttgcttgtgtgggcactttgctacacccttgtctcgtctggcgcacacccagctgggtttccccagcagggtgcggaggtggcagctttagggacaagggagg

SEQ ID NO: 22912 - DNA, 122 bp, Homo sapiens
  misc_feature (61)..(62): /note="This region represents a CpG dinucleotide"
  misc_feature (61)..(61): /note="Nucleotide may be methylated to form 5-methylcytosine"
agaaagaagaaattaatttgacaactcatagagtttcgtcctgggagggagcgagtagtgcggtgctgcactctatgggctgctgcagaaacatacaggatgcattttgtctatctgccaag

SEQ ID NO: 22913 - DNA, 122 bp, Homo sapiens
  misc_feature (61)..(62): /note="This region represents a CpG dinucleotide"
  misc_feature (61)..(61): /note="Nucleotide may be methylated to form 5-methylcytosine"
ggttaaaatctaccattctctgccacaatgctgaaaagaaacctttgctccagcttgaaacgcagcatctgtcagcaaatggggagtcaaatcaagaagtctgaactcactgacagggaaag

SEQ ID NO: 22914 - DNA, 122 bp, Homo sapiens
  misc_feature (61)..(62): /note="This region represents a CpG dinucleotide"
  misc_feature (61)..(61): /note="Nucleotide may be methylated to form 5-methylcytosine"
ctgaagaacttcttctgtctgcaatatcagagaaatgtaacaactattcaatgaaggatacggtgctaagtgctggacagaagataaagatgaatataacacagtctttgctctttaaaacc

SEQ ID NO: 22915 - DNA, 122 bp, Homo sapiens
  misc_feature (61)..(62): /note="This region represents a CpG dinucleotide"
  misc_feature (61)..(61): /note="Nucleotide may be methylated to form 5-methylcytosine"
cagggtcagatctgataggggattagctcagttccaaatactgcgtatactgactcaacacgagaatgaaagccagaatatgagaaatgacagagatgtgcaggcttgaaataatgttttca

SEQ ID NO: 22916 - DNA, 122 bp, Homo sapiens
  misc_feature (61)..(62): /note="This region represents a CpG dinucleotide"
  misc_feature (61)..(61): /note="Nucleotide may be methylated to form 5-methylcytosine"
aaaccaacactgacacaaaccaattgtgccctgatcgggaaacaatgaagtatcgggagtcgctgttgaaagtctgtaatttccagcggaattgctgtttagtcatcatattgccgctgaat

SEQ ID NO: 22917 - DNA, 122 bp, Homo sapiens
  misc_feature (61)..(62): /note="This region represents a CpG dinucleotide"
  misc_feature (61)..(61): /note="Nucleotide may be methylated to form 5-methylcytosine"
ttggataagtggtgtgatatatttcacatggacctcctgcctagttcacttctttatagtcgctagaacactcatgacaatttatttctgggaagaagccaggatgaattcgaaagcatcct

SEQ ID NO: 22918 - DNA, 122 bp, Homo sapiens
  misc_feature (61)..(62): /note="This region represents a CpG dinucleotide"
  misc_feature (61)..(61): /note="Nucleotide may be methylated to form 5-methylcytosine"
tgaatgctaagctgacttgttaagcagggtggagttgccgttagtattttccagctcgcacgaacaaggcagccggatgagaatgagtagcccgagctggatggccggcacatgggcagcag

SEQ ID NO: 22919 - DNA, 122 bp, Homo sapiens
  misc_feature (61)..(62): /note="This region represents a CpG dinucleotide"
  misc_feature (61)..(61): /note="Nucleotide may be methylated to form 5-methylcytosine"
cacataattgatcacagttgagctgctcagacattaaatccaaaggacatcagagaaggacgagttcagtaaagaacactgagaaagaagtggaccctgagcatagatcttggcatacatgc

SEQ ID NO: 22920 - DNA, 122 bp, Homo sapiens
  misc_feature (61)..(62): /note="This region represents a CpG dinucleotide"
  misc_feature (61)..(61): /note="Nucleotide may be methylated to form 5-methylcytosine"
ccgcattcctgaagcataacccttcattagcaagtccgtagcttctttctggaatgtttccgtaagtatctgcacaacggcttcacttccttcccaggccgcggtgctcaaaccacaaatgg

SEQ ID NO: 22921 - DNA, 122 bp, Homo sapiens
  misc_feature (61)..(62): /note="This region represents a CpG dinucleotide"
  misc_feature (61)..(61): /note="Nucleotide may be methylated to form 5-methylcytosine"
ggacagttcattggcttcctgaacatctatgagcctgactatgccaaagctgtgtacagccgtgggggtgaggagagaggatggggatctcaggagagggtggggcttcctgagaacaaagg

SEQ ID NO: 22922 - DNA, 122 bp, Homo sapiens
  misc_feature (61)..(62): /note="This region represents a CpG dinucleotide"
  misc_feature (61)..(61): /note="Nucleotide may be methylated to form 5-methylcytosine"
cggtgctgctgcctaactccttcaagagcagagccgccacattcacaaagcgtctggaatcggaactgatcgtcctctctgctctttctgctttccttccaggcccttccaccgcagccatc

SEQ ID NO: 22923 - DNA, 122 bp, Homo sapiens
  misc_feature (61)..(62): /note="This region represents a CpG dinucleotide"
  misc_feature (61)..(61): /note="Nucleotide may be methylated to form 5-methylcytosine"
ctcatcagcagtccactcttggttaaagcactagattagcaacttctgtttccacagtggcgctcaaccaatattctggtagcagtcaggaggtcaaggtttaactcttatctgggaaaaga

SEQ ID NO: 22924 - DNA, 122 bp, Homo sapiens
  misc_feature (61)..(62): /note="This region represents a CpG dinucleotide"
  misc_feature (61)..(61): /note="Nucleotide may be methylated to form 5-methylcytosine"
tctaggtaccagataataattaaacacaacagacatgggttcccataccagggctccatccgcaacgtaagcaggaaaagattccaagccatgcacatgattcacaaatgacccttggacat

SEQ ID NO: 22925 - DNA, 122 bp, Homo sapiens
  misc_feature (61)..(62): /note="This region represents a CpG dinucleotide"
  misc_feature (61)..(61): /note="Nucleotide may be methylated to form 5-methylcytosine"
tctgcctgtcttcagtgtcccagtctctacacaagctcagctaagggtggtgccatctcacgggagcattccctcataaccatcactggcttggggaatggagctggcaaatcaaattgtca

SEQ ID NO: 22926 - DNA, 122 bp, Homo sapiens
  misc_feature (61)..(62): /note="This region represents a CpG dinucleotide"
  misc_feature (61)..(61): /note="Nucleotide may be methylated to form 5-methylcytosine"
tgctgaacgtcgggccccatgctgactgcaggtcctatgatagcatgggctatgtcagcccgcctctgctactgactcactgacatgcacagattcccagtttgcctccttacagcgaattc

SEQ ID NO: 22927 - DNA, 122 bp, Homo sapiens
  misc_feature (61)..(62): /note="This region represents a CpG dinucleotide"
  misc_feature (61)..(61): /note="Nucleotide may be methylated to form 5-methylcytosine"
agctcagattggggggaaatggcccagcgactgtatttcatctttctggtcccaagaggacgctggaatggagagtcgtgcgtgagtgtgtgcgcgcgcgtgagggtgtgtaagtaaaatgc

SEQ ID NO: 22928 - DNA, 122 bp, Homo sapiens
  misc_feature (61)..(62): /note="This region represents a CpG dinucleotide"
  misc_feature (61)..(61): /note="Nucleotide may be methylated to form 5-methylcytosine"
atattaaggcatctttttctttcatttgcgcacaatgctgatttttgcagtcctattttacgccttaatgtgacaacttcctggtttttttttttttaaacccagaacttaactattacaac

SEQ ID NO: 22929 - DNA, 122 bp, Homo sapiens
  misc_feature (61)..(62): /note="This region represents a CpG dinucleotide"
  misc_feature (61)..(61): /note="Nucleotide may be methylated to form 5-methylcytosine"
tatcttaggtcagctgactcatgaaattgctatcagaaaagcaaactgcttcccctctttcgccatcagactcatggttctgcttttcgtttatttgctgtaccttttctgcctagctattg

SEQ ID NO: 22930 - DNA, 122 bp, Homo sapiens
  misc_feature (61)..(62): /note="This region represents a CpG dinucleotide"
  misc_feature (61)..(61): /note="Nucleotide may be methylated to form 5-methylcytosine"
tgaggattgtcaagttaccagaaagaaaagaaaccaggccagccagccagtcagcctgcacgcactacagaaaagattaacatggcttttcttgtaacagaggtcatagatcagtcccagtg

SEQ ID NO: 22931 - DNA, 122 bp, Homo sapiens
  misc_feature (61)..(62): /note="This region represents a CpG dinucleotide"
  misc_feature (61)..(61): /note="Nucleotide may be methylated to form 5-methylcytosine"
gccttccttgtttggtggcatctctaaaccaagaatgtcaacttctgcctttagaaaactcgtgatcctgcctgtgccaccttccagtggcatcatccccactgctgtccactaagtttggg

SEQ ID NO: 22932 - DNA, 122 bp, Homo sapiens
  misc_feature (61)..(62): /note="This region represents a CpG dinucleotide"
  misc_feature (61)..(61): /note="Nucleotide may be methylated to form 5-methylcytosine"
aaacaggggacaagatgacatatatttgaaaacatgtattacactactgtcttcttcgagcgcctcttgatctatttttccacgagatttttgtcttgtttaatgtctaatgtagcctgggg

SEQ ID NO: 22933 - DNA, 122 bp, Homo sapiens
  misc_feature (61)..(62): /note="This region represents a CpG dinucleotide"
  misc_feature (61)..(61): /note="Nucleotide may be methylated to form 5-methylcytosine"
ttcaactcaaagatagaaaagagaaattttgtatgtgatgcaaatgagtcatctttgctgcggaggagtgatagcgatggattactctagtgtgccttaagacctaacttctttcaaaccag

SEQ ID NO: 22934 - DNA, 122 bp, Homo sapiens
  misc_feature (61)..(62): /note="This region represents a CpG dinucleotide"
  misc_feature (61)..(61): /note="Nucleotide may be methylated to form 5-methylcytosine"
cgctggtaactcacatggccacacgctgtggttttcacacatgtaggctgagccatgagccgctcccctcccaggctctcagacctgactcacagtcatctctgtctcgagtccttacacca

SEQ ID NO: 22935 - DNA, 122 bp, Homo sapiens
  misc_feature (61)..(62): /note="This region represents a CpG dinucleotide"
  misc_feature (61)..(61): /note="Nucleotide may be methylated to form 5-methylcytosine"
cccccacttctggagcccagacctgatcttccccagaagggccactccaggggccagaggcgggcacgccacctagggcgccacgtttcccaagtcacatcccggcccgaccagtcagaggt

SEQ ID NO: 22936 - DNA, 122 bp, Homo sapiens
  misc_feature (61)..(62): /note="This region represents a CpG dinucleotide"
  misc_feature (61)..(61): /note="Nucleotide may be methylated to form 5-methylcytosine"
ttgttttcataatagaagtctgttttctctaacaccttttcttctgttttttttttcattcgttataacttatttttatgtattcacttacaagtttcgtttgtctgtattactcttttcta

SEQ ID NO: 22937 - DNA, 122 bp, Homo sapiens
  misc_feature (61)..(62): /note="This region represents a CpG dinucleotide"
  misc_feature (61)..(61): /note="Nucleotide may be methylated to form 5-methylcytosine"
aaagtcttaacccataggaacttactgatcacgaatgaattcattaagattaccatatggcgaatataagagttaatacctgagacttcactttttgcacaggttactaaaacctgactagg

SEQ ID NO: 22938 - DNA, 122 bp, Homo sapiens
  misc_feature (61)..(62): /note="This region represents a CpG dinucleotide"
  misc_feature (61)..(61): /note="Nucleotide may be methylated to form 5-methylcytosine"
caagactccaggcctctccagcccagtctgtctcctccaactggtcactccatctgtccacgctcttcgggtctgtccctgctcgccagccaaaccacaggtgaaggaagaatgaactcagg

SEQ ID NO: 22939 - DNA, 122 bp, Homo sapiens
  misc_feature (61)..(62): /note="This region represents a CpG dinucleotide"
  misc_feature (61)..(61): /note="Nucleotide may be methylated to form 5-methylcytosine"
acaactcttagaaactctccccacccaacatacctggagtgcaggcgaggtccaggcaaacgggaaagcgacttcttgtacgaatagccatctcaagatgaagccaggctgtggaaaactta

SEQ ID NO: 22940 - DNA, 122 bp, Homo sapiens
  misc_feature (61)..(62): /note="This region represents a CpG dinucleotide"
  misc_feature (61)..(61): /note="Nucleotide may be methylated to form 5-methylcytosine"
gccacccactcactgaagttcccatggacttgtaaaacagccatgtgacctcaggcaaggcgcttaatgttgctgcacctctattggaagaattcagtgaggaatgcgtgatagggccaagg

SEQ ID NO: 22941 - DNA, 122 bp, Homo sapiens
  misc_feature (61)..(62): /note="This region represents a CpG dinucleotide"
  misc_feature (61)..(61): /note="Nucleotide may be methylated to form 5-methylcytosine"
cattcatttcaaagttctgcaccacatggtgcttccagtcacactaaatagtaaaataatcgtggcttatgagtcttttcagagtcagtgagaaaatggaaggagggaattacacaatactc

SEQ ID NO: 22942 - DNA, 122 bp, Homo sapiens
  misc_feature (61)..(62): /note="This region represents a CpG dinucleotide"
  misc_feature (61)..(61): /note="Nucleotide may be methylated to form 5-methylcytosine"
gcactttcctgacatcttggttaggagccaggatgcattcacatgccacagaattctatacgctaataaccagtgctactacaactcagcagaaggtggcttgaaagactggaagtcaactt

SEQ ID NO: 22943 - DNA, 122 bp, Homo sapiens
  misc_feature (61)..(62): /note="This region represents a CpG dinucleotide"
  misc_feature (61)..(61): /note="Nucleotide may be methylated to form 5-methylcytosine"
ctgagagttggaagctctgagtcatgactgagttggaagcttacatgttgatttacaaggcgtctttgcccattacatttatttacatgtccagaggtcatggcctgaaaggcttggctcca

SEQ ID NO: 22944 - DNA, 122 bp, Homo sapiens
  misc_feature (61)..(62): /note="This region represents a CpG dinucleotide"
  misc_feature (61)..(61): /note="Nucleotide may be methylated to form 5-methylcytosine"
cttttttcatcatcattcttggttggtttttaaaaaatcactcgtttatcttcctctttccgtccatattgccaatggatttactcaaactctttgttgctttccttctagattatcatggc

SEQ ID NO: 22945 - DNA, 122 bp, Homo sapiens
  misc_feature (61)..(62): /note="This region represents a CpG dinucleotide"
  misc_feature (61)..(61): /note="Nucleotide may be methylated to form 5-methylcytosine"
tgtttgccgtcatccccttctgccgcgacgtgaaggtgctggcctcagtcatggcgctggcgggcttggccatgggctgcatcgacaccgtggccaacatgcagctggtaaggatgtaccag

SEQ ID NO: 22946 - DNA, 122 bp, Homo sapiens
  misc_feature (61)..(62): /note="This region represents a CpG dinucleotide"
  misc_feature (61)..(61): /note="Nucleotide may be methylated to form 5-methylcytosine"
acagtagaatgtgattcagcccttaaaggaaggaaattctgccatgtgcttcaatgtggacgacccttcaggacattttgctgagtgcaataagccagttccaaaagggcacatactgactg

SEQ ID NO: 22947 - DNA, 122 bp, Homo sapiens
  misc_feature (61)..(62): /note="This region represents a CpG dinucleotide"
  misc_feature (61)..(61): /note="Nucleotide may be methylated to form 5-methylcytosine"
tttagggcaagagtttacatttttatatactttttttatgatttataacctgcctaatttcgaaaaggatttgaggcagcaagagtaaatggcactgggagttacatggatatttttaccct

SEQ ID NO: 22948 - DNA, 122 bp, Homo sapiens
  misc_feature (61)..(62): /note="This region represents a CpG dinucleotide"
  misc_feature (61)..(61): /note="Nucleotide may be methylated to form 5-methylcytosine"
tgctgtggtgtttttgatactccggctcccctgcctccatatttggttagcacatagagccgctgctttgccctgtcctctgtgtcttcagtgccacttggtttatgcaagttgatcttgcc

SEQ ID NO: 22949 - DNA, 122 bp, Homo sapiens
  misc_feature (61)..(62): /note="This region represents a CpG dinucleotide"
  misc_feature (61)..(61): /note="Nucleotide may be methylated to form 5-methylcytosine"
ggtttttctgagtggagcagaatggtgtttcttgggggtttccatctaactggtgtttgacgtcatgaagcaggaagcagagatatgcttctagaggaaatttgttcagtctatgctggttg

SEQ ID NO: 22950 - DNA, 122 bp, Homo sapiens
  misc_feature (61)..(62): /note="This region represents a CpG dinucleotide"
  misc_feature (61)..(61): /note="Nucleotide may be methylated to form 5-methylcytosine"
gcctcccttccgtcatccttcatcaaggtgacataggtctggcgatctttttggcatagacgtgtggacgttgtttttgacatttgtacatgcttttgctcaagttgaaggcccaagtttac

SEQ ID NO: 22951 - DNA, 122 bp, Homo sapiens
  misc_feature (61)..(62): /note="This region represents a CpG dinucleotide"
  misc_feature (61)..(61): /note="Nucleotide may be methylated to form 5-methylcytosine"
attgaggatcaggaaattcttgtgaatcctggcagttggcattaggaaagtggcagtagacgttcacatagactaggggttccagattctggtgacctgcccataaaggtgaaagaaaatta

SEQ ID NO: 22952 - DNA, 122 bp, Homo sapiens
  misc_feature (61)..(62): /note="This region represents a CpG dinucleotide"
  misc_feature (61)..(61): /note="Nucleotide may be methylated to form 5-methylcytosine"
ggcagtctgctcattgctagaaagggtgggtgtggtgtaattgtgcaaagtataatgtggcgtaatctgcttagtgttctatgcggattattctgtgataggatcttgacaattacttgctt

SEQ ID NO: 22953 - DNA, 122 bp, Homo sapiens
  misc_feature (61)..(62): /note="This region represents a CpG dinucleotide"
  misc_feature (61)..(61): /note="Nucleotide may be methylated to form 5-methylcytosine"
ttctccccaaaactctaatgacctccgccttgaccctcagaaaccagacccacaggaacacggtcttctgcaggaactgagagctttacaccagagacacagcactcagaggcttgtcgccc

SEQ ID NO: 22954 - DNA, 122 bp, Homo sapiens
  misc_feature (61)..(62): /note="This region represents a CpG dinucleotide"
  misc_feature (61)..(61): /note="Nucleotide may be methylated to form 5-methylcytosine"
gcccccaagagacactggggacagtaatgtagcttctgtttttcattccatgtaacaatgcgatgacacttccttagtgtgcccactcagcctttccaagccacacccttttgttcctttat

SEQ ID NO: 22955 - DNA, 122 bp, Homo sapiens
  misc_feature (61)..(62): /note="This region represents a CpG dinucleotide"
  misc_feature (61)..(61): /note="Nucleotide may be methylated to form 5-methylcytosine"
gtttcatggtaacttttgtgactggctttagctgtgtaatgtcctcccagcctgttgagtcgcagggcagctttttaccttcttagcatgagccaacttcgactttctcgccaacttcgact

SEQ ID NO: 22956 - DNA, 122 bp, Homo sapiens
  misc_feature (61)..(62): /note="This region represents a CpG dinucleotide"
  misc_feature (61)..(61): /note="Nucleotide may be methylated to form 5-methylcytosine"
gagaatttggatgcaacagggcaacggagcgacgtttctcctctgcactaagccagccctcgcctctgaagaattttgtactaggcgttcactagcactgagatgaactggaattatttcca

SEQ ID NO: 22957 - DNA, 122 bp, Homo sapiens
  misc_feature (61)..(62): /note="This region represents a CpG dinucleotide"
  misc_feature (61)..(61): /note="Nucleotide may be methylated to form 5-methylcytosine"
tgtttcaagttcctcaggcccgttgtgtatacactagcatttgggaagagctggtttagacgtctcactacaatctgtcttaactttaatttggtctgcttgttttatctctttcaatttcc

SEQ ID NO: 22958 - DNA, 122 bp, Homo sapiens
  misc_feature (61)..(62): /note="This region represents a CpG dinucleotide"
  misc_feature (61)..(61): /note="Nucleotide may be methylated to form 5-methylcytosine"
gctgctctcactgtgttccctcagttaattccacaacaaccctaggaaggaggaacaaggcgtggagggattaagaccttgcccacagccacatacagagctagtgagcatcaatgtcaatg

SEQ ID NO: 22959 - DNA, 122 bp, Homo sapiens
  misc_feature (61)..(62): /note="This region represents a CpG dinucleotide"
  misc_feature (61)..(61): /note="Nucleotide may be methylated to form 5-methylcytosine"
acaatgaggcaggaggcatgggaaattctgctcggttttctctaaatcactgggatttggcggcctgctgtcctcagacacacccagactgtgactctaattgccctggtggtgtaaagtaa

SEQ ID NO: 22960 - DNA, 122 bp, Homo sapiens
  misc_feature (61)..(62): /note="This region represents a CpG dinucleotide"
  misc_feature (61)..(61): /note="Nucleotide may be methylated to form 5-methylcytosine"
gttttgttaaattgaggattttggctcaaatttatttttcttaataggctatgagttacacggagaagtagaaagaaaatagctcaagagaagtgtcaacaaatactgttgggggggtactc

SEQ ID NO: 22961 - DNA, 122 bp, Homo sapiens
  misc_feature (61)..(62): /note="This region represents a CpG dinucleotide"
  misc_feature (61)..(61): /note="Nucleotide may be methylated to form 5-methylcytosine"
ccaggcatggtgctgggcatggtagagctacagataagaaccagctgctgcccttgatcacgtagtctggtggaggagacagctctgaggaagaatgatgcttatctgactcagtgtcactt

SEQ ID NO: 22962 - DNA, 122 bp, Homo sapiens
  misc_feature (61)..(62): /note="This region represents a CpG dinucleotide"
  misc_feature (61)..(61): /note="Nucleotide may be methylated to form 5-methylcytosine"
tcttgatcttttcccactttctcaaggcaaattatagatttccttttgcctctagagggacgcaaattgcagttgccagttatatggttctttgtttctctttctagctcttaaaaaaaaaa

SEQ ID NO: 22963 - DNA, 122 bp, Homo sapiens
  misc_feature (61)..(62): /note="This region represents a CpG dinucleotide"
  misc_feature (61)..(61): /note="Nucleotide may be methylated to form 5-methylcytosine"
cctcccaagaggaacatgctcctcatgctacattttctgatgaccaaacattaactcatccgcctaaatctcttcaatgactaaaaagttcctcgcatcatcatgaaatagtagcttgaaat

SEQ ID NO: 22964 - DNA, 122 bp, Homo sapiens
  misc_feature (61)..(62): /note="This region represents a CpG dinucleotide"
  misc_feature (61)..(61): /note="Nucleotide may be methylated to form 5-methylcytosine"
tcaggattgtctcataaatgatgtgctgtggggcattggtgctggctacacatcaagctgcgaaatagccaagtttggtctggtgccttttcttctcttttttcacactgtaagcattaaaa

SEQ ID NO: 22965 - DNA, 122 bp, Homo sapiens
  misc_feature (61)..(62): /note="This region represents a CpG dinucleotide"
  misc_feature (61)..(61): /note="Nucleotide may be methylated to form 5-methylcytosine"
tatcccttggaaaaggggcacctattttatccttacccaatctgtacagaaacagcagaccgagagctgcttccatgtaagtctcacctctcttcagccagtgagggtgtgtggtgaaaggt

SEQ ID NO: 22966 - DNA, 122 bp, Homo sapiens
  misc_feature (61)..(62): /note="This region represents a CpG dinucleotide"
  misc_feature (61)..(61): /note="Nucleotide may be methylated to form 5-methylcytosine"
tgctgacagccaagtttccaaggttttcattcaacctaatactcatttttggtcatattacggctttgagcaaaatgctgaacatgaagaagctgaattgaagatgatactaagtggtgaca

SEQ ID NO: 22967 - DNA, 122 bp, Homo sapiens
  misc_feature (61)..(62): /note="This region represents a CpG dinucleotide"
  misc_feature (61)..(61): /note="Nucleotide may be methylated to form 5-methylcytosine"
atccttctaggtagaagacaggccctgcccctggtatccaaacatcaactccagcctggccgggattaaagggttttgaatcactctctgtaataggacaaaagacctcattcagtggcaaa

SEQ ID NO: 22968 - DNA, 122 bp, Homo sapiens
  misc_feature (61)..(62): /note="This region represents a CpG dinucleotide"
  misc_feature (61)..(61): /note="Nucleotide may be methylated to form 5-methylcytosine"
ctccgaaaaggtaagtcgattcccagtactcaccctgatccatctccctccttctcctgtcggtcaaggcccttcaactagtcaccagtacgattcgagacctaattgcctcttgagcattt

SEQ ID NO: 22969 - DNA, 122 bp, Homo sapiens
  misc_feature (61)..(62): /note="This region represents a CpG dinucleotide"
  misc_feature (61)..(61): /note="Nucleotide may be methylated to form 5-methylcytosine"
tgcggccaactggacctggaaccttgcagggaaggaattctgggaagcatgggacccgcacggctcagctgacacagtataaactcaccagagcttgtccttgcttgtaaggcagtgaaaag

SEQ ID NO: 22970 - DNA, 122 bp, Homo sapiens
  misc_feature (61)..(62): /note="This region represents a CpG dinucleotide"
  misc_feature (61)..(61): /note="Nucleotide may be methylated to form 5-methylcytosine"
tatagagagaagagacacagtccctaacttccaagagctcacagtctggggcaggggatgcgaatatgtggcttgtgaggcagacagataagtaataggcatttatgacataatttggtaaa

SEQ ID NO: 22971 - DNA, 122 bp, Homo sapiens
  misc_feature (61)..(62): /note="This region represents a CpG dinucleotide"
  misc_feature (61)..(61): /note="Nucleotide may be methylated to form 5-methylcytosine"
gcgggcgatagctcagaacctgagaggggtcgcagggcagagacatgccccgcagccacacgttccccgccgccccacacgtaccctgcccccgtagaggatggagggcggctgcagcaccc

SEQ ID NO: 22972 - DNA, 122 bp, Homo sapiens
  misc_feature (61)..(62): /note="This region represents a CpG dinucleotide"
  misc_feature (61)..(61): /note="Nucleotide may be methylated to form 5-methylcytosine"
aattcattgtatggaaaaattagaaatctggtattatgaaatacccgaactgaaaaggctcgacaacaataaacttcccagaagggtaacaccagctcccagcgtgcgccaggtcctctccg

SEQ ID NO: 22973 - DNA, 122 bp, Homo sapiens
  misc_feature (61)..(62): /note="This region represents a CpG dinucleotide"
  misc_feature (61)..(61): /note="Nucleotide may be methylated to form 5-methylcytosine"
acaagaggaaaatcacaagtcatcgcccacccccattgtgattcagaagcttacagaccacgctagcaaaacaggttgtggaagtagggaaaataattctattactagggagaatgaatgga

SEQ ID NO: 22974 - DNA, 122 bp, Homo sapiens
  misc_feature (61)..(62): /note="This region represents a CpG dinucleotide"
  misc_feature (61)..(61): /note="Nucleotide may be methylated to form 5-methylcytosine"
tatctgaggaagaagcgagtccaggccctggctcctttgtctcagggagctgctgtcctgcgactgccacgaagaggttaaggcctgtgctactgccctgcaaagtgcctgaagctgaaagg

SEQ ID NO: 22975 - DNA, 122 bp, Homo sapiens
  misc_feature (61)..(62): /note="This region represents a CpG dinucleotide"
  misc_feature (61)..(61): /note="Nucleotide may be methylated to form 5-methylcytosine"
ctgttatgggttaaaatagcttttaaaaaatgtttcggagaccgcagtctattgtggccgcggcccctgccaaagaaaacgcaagcttgcttattttctccatggggcgcaacagtgcctat

SEQ ID NO: 22976 - DNA, 122 bp, Homo sapiens
  misc_feature (61)..(62): /note="This region represents a CpG dinucleotide"
  misc_feature (61)..(61): /note="Nucleotide may be methylated to form 5-methylcytosine"
gtccttcaggtctcaccttattaagaaccataattaccacttaatttgagccaggaactacgctaaatgtttcctatgcactatcaggctgaacacttctaaacaccctataagctgagtgt

SEQ ID NO: 22977 - DNA, 122 bp, Homo sapiens
  misc_feature (61)..(62): /note="This region represents a CpG dinucleotide"
  misc_feature (61)..(61): /note="Nucleotide may be methylated to form 5-methylcytosine"
cggaactgagcccgcgtgttctgaggccagggcagggctggagcgttctgaacacctccccgtcccagcccctgggccaggcaagggccggccttacctctcctgggttggtggcagcagag

SEQ ID NO: 22978 - DNA, 122 bp, Homo sapiens
  misc_feature (61)..(62): /note="This region represents a CpG dinucleotide"
  misc_feature (61)..(61): /note="Nucleotide may be methylated to form 5-methylcytosine"
gaatcatccctttgtccagcctatccagccctggctcccacccgctagtcactgagtaagcgatttggtcatcagatcgactgttgcagtatggtaatgttgtattcaaataacccttattt

SEQ ID NO: 22979 - DNA, 122 bp, Homo sapiens
  misc_feature (61)..(62): /note="This region represents a CpG dinucleotide"
  misc_feature (61)..(61): /note="Nucleotide may be methylated to form 5-methylcytosine"
tatataacagtactttcactgccctgcccacaaggttataatgcaaactcggaaatgctgcgggcagaattcttgcaagggtgtaatcctacagagaagttactcaggtctcaaagtgacag

SEQ ID NO: 22980 - DNA, 122 bp, Homo sapiens
  misc_feature (61)..(62): /note="This region represents a CpG dinucleotide"
  misc_feature (61)..(61): /note="Nucleotide may be methylated to form 5-methylcytosine"
aacctacctcatgggttggtgaggaattaatcagctcacacatggttagccctcagtaaacgttggctgttatggttgtgtctttccactctctgcctcgcactttaagatctggctacatg

SEQ ID NO: 22981 - DNA, 122 bp, Homo sapiens
  misc_feature (61)..(62): /note="This region represents a CpG dinucleotide"
  misc_feature (61)..(61): /note="Nucleotide may be methylated to form 5-methylcytosine"
ctccggcaggaagtatagcccatgggggtctaaccctatctgaatgtggtccctggagcccggcttgtacccagtggggcctggccttggggtgtggcccaggcaggcccagaatgggggag

SEQ ID NO: 22982 - DNA, 122 bp, Homo sapiens
  misc_feature (61)..(62): /note="This region represents a CpG dinucleotide"
  misc_feature (61)..(61): /note="Nucleotide may be methylated to form 5-methylcytosine"
agacctatgaattacttggtggttgtgacttttccattataattaataagacttctattacgcttagactagtcagtggttgtcatgccgatgcaaatattagcttatctccatggctatat

SEQ ID NO: 22983 - DNA, 122 bp, Homo sapiens
  misc_feature (61)..(62): /note="This region represents a CpG dinucleotide"
  misc_feature (61)..(61): /note="Nucleotide may be methylated to form 5-methylcytosine"
gctgggacctctcctttcactcctgaatgatttaggcttgtagccgggactcacttccagcggaaggtgaagaacagtgaaggctgaattccccagggagtcattacctcctctggtgctaa

SEQ ID NO: 22984 - DNA, 122 bp, Homo sapiens
  misc_feature (61)..(62): /note="This region represents a CpG dinucleotide"
  misc_feature (61)..(61): /note="Nucleotide may be methylated to form 5-methylcytosine"
ttaaatttttagatggtcattgaggtgatccaacctctaaaatccctgatcacggtctaacgcagaagccctggcccccactctgggaacccaggcccaggagcgcctttggggtggtttgt

SEQ ID NO: 22985 - DNA, 122 bp, Homo sapiens
  misc_feature (61)..(62): /note="This region represents a CpG dinucleotide"
  misc_feature (61)..(61): /note="Nucleotide may be methylated to form 5-methylcytosine"
ctcacaacaaccctgccaggcagctaatccaaagtgaggagcaattactgggcttcattccgccttagaggtgagcagacagaggcttggcaggttaagggactgcaccaaagccatgcggg

SEQ ID NO: 22986 - DNA, 122 bp, Homo sapiens
  misc_feature (61)..(62): /note="This region represents a CpG dinucleotide"
  misc_feature (61)..(61): /note="Nucleotide may be methylated to form 5-methylcytosine"
gaaataatttatcttttacagtaaaagtatagagtattacatcataaaatacattggctacggtgttagttcttggacatctggttctagattacagtgactcagtagagtttgtgatgatc

SEQ ID NO: 22987 - DNA, 122 bp, Homo sapiens
  misc_feature (61)..(62): /note="This region represents a CpG dinucleotide"
  misc_feature (61)..(61): /note="Nucleotide may be methylated to form 5-methylcytosine"
aatgagccccggagcccaggctctgcaggttgttgctgttacgtaagccagtgcaggagccgtgctgagaaaaggaaactgcgcaatctgctcaggttcccaggaaggccagggtccttgtc

SEQ ID NO: 22988 - DNA, 122 bp, Homo sapiens
  misc_feature (61)..(62): /note="This region represents a CpG dinucleotide"
  misc_feature (61)..(61): /note="Nucleotide may be methylated to form 5-methylcytosine"
tttattgttttgcttagtctggttttatttcaggaagttaggagacactgggcccgacagcgcagatgacaagccgtgatgcaaatgcttcctatctatgagacaggaaatgctctcagacc

SEQ ID NO: 22989 - DNA, 122 bp, Homo sapiens
  misc_feature (61)..(62): /note="This region represents a CpG dinucleotide"
  misc_feature (61)..(61): /note="Nucleotide may be methylated to form 5-methylcytosine"
ataagataaaccttttaataaccatttcttataggcactgagtagtttgtaggtgggcatcgaatttccaatgtggaaattatgctgaaaaaactgtctcccagcaggggtatttattttct

SEQ ID NO: 22990 - DNA, 122 bp, Homo sapiens
  misc_feature (61)..(62): /note="This region represents a CpG dinucleotide"
  misc_feature (61)..(61): /note="Nucleotide may be methylated to form 5-methylcytosine"
ttgcacggggaggggcggagcttacctaaaacaaacccacggttacagaaacaagagaagcggagctttgtgcttgcctaaagacgtacccacaactacatagataacggagagttatgcag

SEQ ID NO: 22991 - DNA, 122 bp, Homo sapiens
  misc_feature (61)..(62): /note="This region represents a CpG dinucleotide"
  misc_feature (61)..(61): /note="Nucleotide may be methylated to form 5-methylcytosine"
tctgacagtgtgacaagtggcaaccctcccttttttgagcagctacaaaaatagaaattgcggtacttgccttccaagacctcagaggtgttggctaatggattgctgttaacagatgccac

SEQ ID NO: 22992 - DNA, 122 bp, Homo sapiens
  misc_feature (61)..(62): /note="This region represents a CpG dinucleotide"
  misc_feature (61)..(61): /note="Nucleotide may be methylated to form 5-methylcytosine"
tatttttacctaagggcttatatgaataagcccaatgactatcaaacacaataaaagctgcgtaactgctacctcacccatggaaaaaatgtatgattaactcattgggcaatgcagaatga

SEQ ID NO: 22993 - DNA, 122 bp, Homo sapiens
  misc_feature (61)..(62): /note="This region represents a CpG dinucleotide"
  misc_feature (61)..(61): /note="Nucleotide may be methylated to form 5-methylcytosine"
tgcccccagggaatgtacagcaagcctgggagacagactcacagtcaggcccgtgcataacgcattccagggaagacaggagaagcctgccaactacgattcaaagtccagggagtttcctt

SEQ ID NO: 22994 - DNA, 122 bp, Homo sapiens
  misc_feature (61)..(62): /note="This region represents a CpG dinucleotide"
  misc_feature (61)..(61): /note="Nucleotide may be methylated to form 5-methylcytosine"
gtaccttagtttcctcacctgtaaagccaggatggccatgcaagtatcattcagagtaggcgtgaggtttcaataagccagattaggtgatgcacttaccacagtgcctgcacccgttaagt

SEQ ID NO: 22995 - DNA, 122 bp, Homo sapiens
  misc_feature (61)..(62): /note="This region represents a CpG dinucleotide"
  misc_feature (61)..(61): /note="Nucleotide may be methylated to form 5-methylcytosine"
ttccccaaagaggcagatgttcagaaacctcctgctttccacacgaagctcagaaaggtgcgttaacttgcccaagctcacacaggcaatgaggcaggccaggcatttggacacaggtttgt

SEQ ID NO: 22996 - DNA, 122 bp, Homo sapiens
  misc_feature (61)..(62): /note="This region represents a CpG dinucleotide"
  misc_feature (61)..(61): /note="Nucleotide may be methylated to form 5-methylcytosine"
gcttttcttctcccaggaagaatccagaatagttcagacaagcttcaggtccgccagaaccggggaaaacaacgtgtagggtttgttttaaagggcttttaaatggggtttgggagatccag

SEQ ID NO: 22997 - DNA, 122 bp, Homo sapiens
  misc_feature (61)..(62): /note="This region represents a CpG dinucleotide"
  misc_feature (61)..(61): /note="Nucleotide may be methylated to form 5-methylcytosine"
gttgttgaagccttgtctgcttaattggacagtggatctctcgggtccctgtgggctgtgcgcttgtacttgagctctgcttcttcactctgtggtctaggccagctagcagccagctgagt

SEQ ID NO: 22998 - DNA, 122 bp, Homo sapiens
  misc_feature (61)..(62): /note="This region represents a CpG dinucleotide"
  misc_feature (61)..(61): /note="Nucleotide may be methylated to form 5-methylcytosine"
agcacccagccagggattcactttcttacctgaaactactaaaaatctgaacaaactatacgacacaacagtttcaggatttggttagttagcacaggattgtgtccctgaaagaagggagg

SEQ ID NO: 22999 - DNA, 122 bp, Homo sapiens
  misc_feature (61)..(62): /note="This region represents a CpG dinucleotide"
  misc_feature (61)..(61): /note="Nucleotide may be methylated to form 5-methylcytosine"
ctgaactgcaatatgtaagatcccaaagggacttggtgagcatctcctcttccttcaagacgcttactcattgaatggctattctgtgtcgggcaccattccaagtgatggtgatacagcag

SEQ ID NO: 23000 - DNA, 122 bp, Homo sapiens
  misc_feature (61)..(62): /note="This region represents a CpG dinucleotide"
  misc_feature (61)..(61): /note="Nucleotide may be methylated to form 5-methylcytosine"
taccaccctcactttctccccaactctgaaatgcttttcactctctacctaggctgaagccgacgtagcttctctgaacagacgcatccagctggttgaggaagagttggatcgtgcccagg

SEQ ID NO: 23001 - DNA, 122 bp, Homo sapiens
  misc_feature (61)..(62): /note="This region represents a CpG dinucleotide"
  misc_feature (61)..(61): /note="Nucleotide may be methylated to form 5-methylcytosine"
ccagggacatcaggagatgctgatcttcagcgggggcctgtaagatgatgaccgccctggcgagggagggttacagaaacagataaaagacaagaccaaacaaagagagttcactttggctc

SEQ ID NO: 23002 - DNA, 122 bp, Homo sapiens
  misc_feature (61)..(62): /note="This region represents a CpG dinucleotide"
  misc_feature (61)..(61): /note="Nucleotide may be methylated to form 5-methylcytosine"
ttgtgatacggtacatggtggaactgtgacgatacggggcacggtggaactgtggcgatacggggcacggtggaactgtgatgatatcgggcatggcgaaattgtgatacggtgcatggtgt

SEQ ID NO: 23003 - DNA, 122 bp, Homo sapiens
  misc_feature (61)..(62): /note="This region represents a CpG dinucleotide"
  misc_feature (61)..(61): /note="Nucleotide may be methylated to form 5-methylcytosine"
caaacaggatcgttcagctgttgttcttcaactgttgttcgacagctgattgattggatacggagtgagagaaaaaacaagaaagactccattgctttggtctgagtaatttggtggtagta

SEQ ID NO: 23004 - DNA, 122 bp, Homo sapiens
  misc_feature (61)..(62): /note="This region represents a CpG dinucleotide"
  misc_feature (61)..(61): /note="Nucleotide may be methylated to form 5-methylcytosine"
aactcaactcttactcctccagatctgctccagccctgatggctgcttgtgttgtcaaaacgaaacattgctgtctggtgaaggagaacacccacatccttgctgagtcagcaggctcaggg

SEQ ID NO: 23005 - DNA, 122 bp, Homo sapiens
  misc_feature (61)..(62): /note="This region represents a CpG dinucleotide"
  misc_feature (61)..(61): /note="Nucleotide may be methylated to form 5-methylcytosine"
cacggaggacgctggagaatgagggcggctcccgtcccgttcctgagcacgctcgagtcccgcctccacctcacagcagctcttccgtgcggtaagcgggagactcccattttcaaggccaa

SEQ ID NO: 23006 - DNA, 122 bp, Homo sapiens
  misc_feature (61)..(62): /note="This region represents a CpG dinucleotide"
  misc_feature (61)..(61): /note="Nucleotide may be methylated to form 5-methylcytosine"
ctcccagactcatgtcctgccatacccggtaattagtgacgtttctccaaaggcaagtttcgtaagatggcccttggtccccggcctcccttcctcatggtgatgatgcgttcagagtcagg

SEQ ID NO: 23007 - DNA, 122 bp, Homo sapiens
  misc_feature (61)..(62): /note="This region represents a CpG dinucleotide"
  misc_feature (61)..(61): /note="Nucleotide may be methylated to form 5-methylcytosine"
tgggcaggggctcaggaatgggagttgctgattggctggggatgaaatcataggagtgtgcgaaatggtcctcatgtagagttcacctctgggtggggccacaggatcagttgagtcatgag

SEQ ID NO: 23008 - DNA, 122 bp, Homo sapiens
  misc_feature (61)..(62): /note="This region represents a CpG dinucleotide"
  misc_feature (61)..(61): /note="Nucleotide may be methylated to form 5-methylcytosine"
agcccagaagcctcagcacttaccgagtagagagctccgccgccgaacctggttaatccacgtgctaggggtggggccccccagggccctccggttcagctcctggctgatggccatcacag

SEQ ID NO: 23009 - DNA, 122 bp, Homo sapiens
  misc_feature (61)..(62): /note="This region represents a CpG dinucleotide"
  misc_feature (61)..(61): /note="Nucleotide may be methylated to form 5-methylcytosine"
agataacccagtatgcagaatccagccacccacacgcactcaggagacccctctgacgggcggcactggctttccggggcctctgtgggctggacagcatctcaacctcttcaccatcctac

SEQ ID NO: 23010 - DNA, 122 bp, Homo sapiens
  misc_feature (61)..(62): /note="This region represents a CpG dinucleotide"
  misc_feature (61)..(61): /note="Nucleotide may be methylated to form 5-methylcytosine"
gttaagtaagacgcgcctgtccgctcctgtcacttcctcccagcggcttcctcgtgcagtcgccctacgaaaccagcgtgcacccatgcctgccggcagctcctgaccgttgcttcactgtt

SEQ ID NO: 23011 - DNA, 122 bp, Homo sapiens
  misc_feature (61)..(62): /note="This region represents a CpG dinucleotide"
  misc_feature (61)..(61): /note="Nucleotide may be methylated to form 5-methylcytosine"
ctctactgtaattcccatcttgataaataggttctgttgagccagcgggcaaggtgaccccgttgggtggttacaattagacagtcatgcatcacttaacaatgggaatacattctaagaaa

SEQ ID NO: 23012 - DNA, 122 bp, Homo sapiens
  misc_feature (61)..(62): /note="This region represents a CpG dinucleotide"
  misc_feature (61)..(61): /note="Nucleotide may be methylated to form 5-methylcytosine"
tggctgggatttatgagggtgcttcagaagccggtatccacaaatgttaacccggttgctcgctggtgaaataactaccgtgaccctctattgatacctggtcgccgtggcacttcggaatc

SEQ ID NO: 23013 - DNA, 122 bp, Homo sapiens
  misc_feature (61)..(62): /note="This region represents a CpG dinucleotide"
  misc_feature (61)..(61): /note="Nucleotide may be methylated to form 5-methylcytosine"
agtcctgtcataatcttatcacattgtacatacttgaaaaaataattggtaaacattctacgaacattctaacctagagtagcccaaaagtaagtggccactacagtgccctggggctttct

SEQ ID NO: 23014 - DNA, 122 bp, Homo sapiens
  misc_feature (61)..(62): /note="This region represents a CpG dinucleotide"
  misc_feature (61)..(61): /note="Nucleotide may be methylated to form 5-methylcytosine"
tcataccctagcctggaactactaaatctgtctgcattttaaccagatccccaggtgatccgatgcattggaaagtgtgagaaggcctgggcggggataggaggatgaacctgcaacaggaa

SEQ ID NO: 23015 - DNA, 122 bp, Homo sapiens
  misc_feature (61)..(62): /note="This region represents a CpG dinucleotide"
  misc_feature (61)..(61): /note="Nucleotide may be methylated to form 5-methylcytosine"
gagatggtacatcaggataactgctcgtatcaggtaaaatttaaagcctgattctgaggccggcatcctttgggagaggaggccttcctcttccaaagcagcaggttgcctctttccggata

SEQ ID NO: 23016 - DNA, 122 bp, Homo sapiens
  misc_feature (61)..(62): /note="This region represents a CpG dinucleotide"
  misc_feature (61)..(61): /note="Nucleotide may be methylated to form 5-methylcytosine"
tttaactggggcagccagcccagccgagccctcctctggggcctccgggctccacagcagcgtgttctcaccagcacaggatgccccacccatggccaccatccagggtgcacatcaggccc

SEQ ID NO: 23017 - DNA, 122 bp, Homo sapiens
  misc_feature (61)..(62): /note="This region represents a CpG dinucleotide"
  misc_feature (61)..(61): /note="Nucleotide may be methylated to form 5-methylcytosine"
gacaactcatggcggtggcggcagcagctgcttgggcatggtgcagtggtgactgagctacgagcctggcggcgggtgttcgccgagctccggtccccgcgtgtctcccagaaggcggtgaa

SEQ ID NO: 23018 - DNA, 122 bp, Homo sapiens
  misc_feature (61)..(62): /note="This region represents a CpG dinucleotide"
  misc_feature (61)..(61): /note="Nucleotide may be methylated to form 5-methylcytosine"
tgtgtgctgtttctggatagaaaggcttaagttcttctgggacaaaaaatgtcaaagaaccgagacatttttagaaagaaaataaggaagacagcttggtatctttgtagatgaaatgatat

SEQ ID NO: 23019 - DNA, 122 bp, Homo sapiens
  misc_feature (61)..(62): /note="This region represents a CpG dinucleotide"
  misc_feature (61)..(61): /note="Nucleotide may be methylated to form 5-methylcytosine"
caaggcaacaaaggatggcagtaatgcgataatgccagagtgcaacgggtgttaagaacccgttgcatttatgtattgtatttagtaaataatcaggctcatccaaattgtgatctcaccac

SEQ ID NO: 23020 - DNA, 122 bp, Homo sapiens
  misc_feature (61)..(62): /note="This region represents a CpG dinucleotide"
  misc_feature (61)..(61): /note="Nucleotide may be methylated to form 5-methylcytosine"
aatctggaagtatgaaaatatgattacaagttccattcattatttgtgttctgtggttttcgtattgttcttgaaatttacttcctgcctgcctgaagttttgtattatgaatttagtgtca

SEQ ID NO: 23021 - DNA, 122 bp, Homo sapiens
  misc_feature (61)..(62): /note="This region represents a CpG dinucleotide"
  misc_feature (61)..(61): /note="Nucleotide may be methylated to form 5-methylcytosine"
aacatttataccagctgatggtcacttgattctcacatctctctatttagtaaattgctccgcaagccaacttgaagactgaggtgaacattctctgggacgttcctgctgaagacattttt

SEQ ID NO: 23022 - DNA, 122 bp, Homo sapiens
  misc_feature (61)..(62): /note="This region represents a CpG dinucleotide"
  misc_feature (61)..(61): /note="Nucleotide may be methylated to form 5-methylcytosine"
acaggaagcaagtgcctcctcatacaggaagcactggcattaggaacaccctgtatttctcgcctgcagctgcactgtgtcactcactgatgtcattctcctatctgaagggctcagggtcc

SEQ ID NO: 23023 - DNA, 122 bp, Homo sapiens
  misc_feature (61)..(62): /note="This region represents a CpG dinucleotide"
  misc_feature (61)..(61): /note="Nucleotide may be methylated to form 5-methylcytosine"
gaagttggtgtatttgcctgctgtggtgatcgaaatgctgggtgtgtatggagtcagcaacgtcactgcagacctgaagcaacacaccccacacttacagtctgtggcagtacttgcctccc

SEQ ID NO: 23024 - DNA, 122 bp, Homo sapiens
  misc_feature (61)..(62): /note="This region represents a CpG dinucleotide"
  misc_feature (61)..(61): /note="Nucleotide may be methylated to form 5-methylcytosine"
tctaaatcaaacctagggtttaaaacatcatttgccgacagacatcctccaagtgttttccgcagaggcacatcacttctgattattcccaggctattttaaatgatcttggacagggctac

SEQ ID NO: 23025 - DNA, 122 bp, Homo sapiens
  misc_feature (61)..(62): /note="This region represents a CpG dinucleotide"
  misc_feature (61)..(61): /note="Nucleotide may be methylated to form 5-methylcytosine"
agtgaggttaactgtacttctataggtcactcagtgagtcaacgactgagctatgattaacgttgacagctggtgagctgctaggctgttgctaactgagcaacattgacattcattttgat

SEQ ID NO: 23026 - DNA, 122 bp, Homo sapiens
  misc_feature (61)..(62): /note="This region represents a CpG dinucleotide"
  misc_feature (61)..(61): /note="Nucleotide may be methylated to form 5-methylcytosine"
gatggttctgcaactcatcaccagctatgcaaactgacagttcacatcctggggcagcagcggggtctggcctgcagaaaggagcagcctgaccaaatttacgctcacaagatctcttaatt

SEQ ID NO: 23027 - DNA, 122 bp, Homo sapiens
  misc_feature (61)..(62): /note="This region represents a CpG dinucleotide"
  misc_feature (61)..(61): /note="Nucleotide may be methylated to form 5-methylcytosine"
cacaatgcacatagtgtttactcctgccctacccttttgctcatacttggaatacttcttcgcataccagcactgaaacatatcattctcttagtttcttttcaaataaactatattttctg

SEQ ID NO: 23028 - DNA, 122 bp, Homo sapiens
  misc_feature (61)..(62): /note="This region represents a CpG dinucleotide"
  misc_feature (61)..(61): /note="Nucleotide may be methylated to form 5-methylcytosine"
gctaaaacttggctaaaagtcttgctgcccctttgtggacagtttgctaactctccatcccggcgacttcacacctcaggttcttgttgttcacgggtgctatcctgtcttatttcacaaat

SEQ ID NO: 23029 - DNA, 122 bp, Homo sapiens
  misc_feature (61)..(62): /note="This region represents a CpG dinucleotide"
  misc_feature (61)..(61): /note="Nucleotide may be methylated to form 5-methylcytosine"
tgagttaggctgtcagaacagtgcgggctagaggcgcacacgtttcatctaggcttcgggcggggcgcagcaggtgggtgaggctgcggtggtggctgctgcccagggtgggaggctcaggg

SEQ ID NO: 23030 - DNA, 122 bp, Homo sapiens
  misc_feature (61)..(62): /note="This region represents a CpG dinucleotide"
  misc_feature (61)..(61): /note="Nucleotide may be methylated to form 5-methylcytosine"
ctgaagactgcagtgcacggccaaatagaaatgtgttttgtcggctcagaggctctttttcgtttcctgcttggctagctctctgctgcattccaaatagctgagggacttccagataatca

SEQ ID NO: 23031 - DNA, 122 bp, Homo sapiens
  misc_feature (61)..(62): /note="This region represents a CpG dinucleotide"
  misc_feature (61)..(61): /note="Nucleotide may be methylated to form 5-methylcytosine"
agtgtccttccactcctgtggtattaagtactaaacagcctgaagtgcttcaaacacagacgtcagatgaacttggctcatcccaggcacaaagccacaagcaccatgaatgacgttaagta

SEQ ID NO: 23032 - DNA, 122 bp, Homo sapiens
  misc_feature (61)..(62): /note="This region represents a CpG dinucleotide"
  misc_feature (61)..(61): /note="Nucleotide may be methylated to form 5-methylcytosine"
ctaattcctgccttgtgagtggtcctgatgctgacagatgcagtaggtatcttgcagccacgaggaagaaaacagcatgactaaggacaggaggagctgaaagggggatgacacgtgatttc

SEQ ID NO: 23033 - DNA, 122 bp, Homo sapiens
  misc_feature (61)..(62): /note="This region represents a CpG dinucleotide"
  misc_feature (61)..(61): /note="Nucleotide may be methylated to form 5-methylcytosine"
ccttcttcttatcattatcattatcagcagtagtagtaacagataatgactatcaattgacgtgggagacaattacaattacatgtcattgtgaaactcattaggtgactgtgatttagagt

SEQ ID NO: 23034 - DNA, 122 bp, Homo sapiens
  misc_feature (61)..(62): /note="This region represents a CpG dinucleotide"
  misc_feature (61)..(61): /note="Nucleotide may be methylated to form 5-methylcytosine"
accattctccagccagcgttgtctcctgttcttctcacctccccctattccatcctgccccgagtagtctattcgtgctaaagcattcactgagaaaaactgtaaagggagagtcccttctc

SEQ ID NO: 23035 - DNA, 122 bp, Homo sapiens
  misc_feature (61)..(62): /note="This region represents a CpG dinucleotide"
  misc_feature (61)..(61): /note="Nucleotide may be methylated to form 5-methylcytosine"
atactccattaaattcctacagtccacagtgcagggaagtccctaggcccaggatacaatcgctcctgattttgagggcatgtatccaaacacatggcctactgaaaacaaatgcattttaa

SEQ ID NO: 23036 - DNA, 122 bp, Homo sapiens
  misc_feature (61)..(62): /note="This region represents a CpG dinucleotide"
  misc_feature (61)..(61): /note="Nucleotide may be methylated to form 5-methylcytosine"
agatttgacgtcacagacagcaggcagcacagaggagacatgccacctgttggtgccaagcgtgtcctaccttggaaacatgagcaatcaatgtgctgacctttcttcctggagagtttgag

SEQ ID NO: 23037 - DNA, 122 bp, Homo sapiens
  misc_feature (61)..(62): /note="This region represents a CpG dinucleotide"
  misc_feature (61)..(61): /note="Nucleotide may be methylated to form 5-methylcytosine"
gcatgactcctgtgggagctgtctgcagagggattgctgggtgcagagtcactgcctctccgtctgtcaactgctgctgctccagaataaacaggcagccgggcttctcgcggttgtggaga

SEQ ID NO: 23038 - DNA, 122 bp, Homo sapiens
  misc_feature (61)..(62): /note="This region represents a CpG dinucleotide"
  misc_feature (61)..(61): /note="Nucleotide may be methylated to form 5-methylcytosine"
ataattccaacattcctgcatacctgggtttggttttgacgctttctctgtctcttaaatcgtcttttttgcttttcagtatgccttgtaatttttgctaaaaggcaaacatgatagaagag

SEQ ID NO: 23039 - DNA, 122 bp, Homo sapiens
  misc_feature (61)..(62): /note="This region represents a CpG dinucleotide"
  misc_feature (61)..(61): /note="Nucleotide may be methylated to form 5-methylcytosine"
ctctgctctgatgttctagtgcaaggaatgaaatgaatgaataggtcatttggcattccgcggttatgtcagcaggcatgactgctgtcacattaactgagcaagaaagggatcttcatcac

SEQ ID NO: 23040 - DNA, 122 bp, Homo sapiens
  misc_feature (61)..(62): /note="This region represents a CpG dinucleotide"
  misc_feature (61)..(61): /note="Nucleotide may be methylated to form 5-methylcytosine"
ttctcagccatccctgtggttcttacggcaatgtctagctgtgggactgcactggtgcttcgatggctcatagaagccccatataaggcactgctcctgtgggatgtgcctgtcaaacctgc

SEQ ID NO: 23041 - DNA, 122 bp, Homo sapiens
  misc_feature (61)..(62): /note="This region represents a CpG dinucleotide"
  misc_feature (61)..(61): /note="Nucleotide may be methylated to form 5-methylcytosine"
taattaattataagtgaaaagccaaaatgaggtattaggtcaagcatagctatgtgtctccgcttcaaatccagccataagctgataattgcagttcataagtatgataattgggtgctcac

SEQ ID NO: 23042 - DNA, 122 bp, Homo sapiens
  misc_feature (61)..(62): /note="This region represents a CpG dinucleotide"
  misc_feature (61)..(61): /note="Nucleotide may be methylated to form 5-methylcytosine"
aagaagtccctctgggaagaatttcaggccctgtggctgacagccacatgagatggctgccggggagatatttgggcaaggagattgttttctgatttccttaattctatcttgagggtaac

SEQ ID NO: 23043 - DNA, 122 bp, Homo sapiens
  misc_feature (61)..(62): /note="This region represents a CpG dinucleotide"
  misc_feature (61)..(61): /note="Nucleotide may be methylated to form 5-methylcytosine"
cctttaggtttccagactggcttgctctttggctgaccttcaattccctctccaggactccgcaccactcccctacacccagagcattctcttcccctcatctcttggggctgttcctggtt

SEQ ID NO: 23044 - DNA, 122 bp, Homo sapiens
  misc_feature (61)..(62): /note="This region represents a CpG dinucleotide"
  misc_feature (61)..(61): /note="Nucleotide may be methylated to form 5-methylcytosine"
actcaacaagcagattttatggagaccccagtaaaaccccaaggatggcaataaataaatcgccagccggttctcccatacagctgcctcttccacaagacctcaagcctctgaaggcagag

SEQ ID NO: 23045 - DNA, 122 bp, Homo sapiens
  misc_feature (61)..(62): /note="This region represents a CpG dinucleotide"
  misc_feature (61)..(61): /note="Nucleotide may be methylated to form 5-methylcytosine"
tcaggtgattaaggaggatccttttcttcctccctttttatatggagcaggatcccagcccgtttgtaaaaaaatagaaggacacagaagggaaaacttgaaaatgaaaactgaaaaacaag

SEQ ID NO: 23046 - DNA, 122 bp, Homo sapiens
  misc_feature (61)..(62): /note="This region represents a CpG dinucleotide"
  misc_feature (61)..(61): /note="Nucleotide may be methylated to form 5-methylcytosine"
ctccctcacaaaaaattactgcgggcagcttggcatgccctgtgtaaacacacacccacacgcacagacaccatgtatgtgtctgtgccattgtcatgtgttttgagctgtttcccagcact

SEQ ID NO: 23047 - DNA, 122 bp, Homo sapiens
  misc_feature (61)..(62): /note="This region represents a CpG dinucleotide"
  misc_feature (61)..(61): /note="Nucleotide may be methylated to form 5-methylcytosine"
gggcaggagaataacaggcggtgccctggaggaacactgcatgctgctgaggaaggagggcggccttggcgatgatgtcaccatgaagcacttggaattgagacagaacattctcacttggg

SEQ ID NO: 23048 - DNA, 122 bp, Homo sapiens
  misc_feature (61)..(62): /note="This region represents a CpG dinucleotide"
  misc_feature (61)..(61): /note="Nucleotide may be methylated to form 5-methylcytosine"
cctcactttcacatctggaggttcctggaacaacagtctagtattttctagctctatttacgattctgtttgactgtggactataatccttttcaagtattattttaaagtacacactgttt

SEQ ID NO: 23049 - DNA, 122 bp, Homo sapiens
  misc_feature (61)..(62): /note="This region represents a CpG dinucleotide"
  misc_feature (61)..(61): /note="Nucleotide may be methylated to form 5-methylcytosine"
gcctgggcttggccccagtagacatatgagaacaggtgactgccagaaccacccagagggcgggaagcctgctgttgccaggtccaccatgtgaatcacaatgactgcatgaggtcacagaa

SEQ ID NO: 23050 - DNA, 122 bp, Homo sapiens
  misc_feature (61)..(62): /note="This region represents a CpG dinucleotide"
  misc_feature (61)..(61): /note="Nucleotide may be methylated to form 5-methylcytosine"
ctgccacacagcctctaatgcatcagccaccatctcagaagtcaattcagacatttctcacgtgttctgagaaacatggggaagagcccataccaaggtactcacataaagactgtagttta

SEQ ID NO: 23051 - DNA, 122 bp, Homo sapiens
  misc_feature (61)..(62): /note="This region represents a CpG dinucleotide"
  misc_feature (61)..(61): /note="Nucleotide may be methylated to form 5-methylcytosine"
tctgcttctcacacccccaggtggcagaggagggagggatggaacagaactcagttgtgacgtaaggagacacaaagtttgggacaacagaatggttcctacaaaagtaaagtactaactga

SEQ ID NO: 23052 - DNA, 122 bp, Homo sapiens
  misc_feature (61)..(62): /note="This region represents a CpG dinucleotide"
  misc_feature (61)..(61): /note="Nucleotide may be methylated to form 5-methylcytosine"
aaatgagttcagcaggactgcaaggagctacagcattccaaccctgtgtgtgacaggggccgaagccagagggtgccaggcccaggaggggaaccctgcaatgctcacctcggctgcagctg

SEQ ID NO: 23053 - DNA, 122 bp, Homo sapiens
  misc_feature (61)..(62): /note="This region represents a CpG dinucleotide"
  misc_feature (61)..(61): /note="Nucleotide may be methylated to form 5-methylcytosine"
acggaaaccacagggccagcgtcttgagccctcgatcagacgcctcccgcccaccgcggccgcttctccacgcttttgcccagatctctgcaccgcgtggcccggtcttgcctccctgagga

SEQ ID NO: 23054 - DNA, 122 bp, Homo sapiens
  misc_feature (61)..(62): /note="This region represents a CpG dinucleotide"
  misc_feature (61)..(61): /note="Nucleotide may be methylated to form 5-methylcytosine"
gacgccaagctccgagatcagtgtctggagcttccagttttccagggtgacttgctccatcgtgtctttggatttcctgacactctcagacgtggctttctggagttggcccagattccctt

SEQ ID NO: 23055 - DNA, 122 bp, Homo sapiens
  misc_feature (61)..(62): /note="This region represents a CpG dinucleotide"
  misc_feature (61)..(61): /note="Nucleotide may be methylated to form 5-methylcytosine"
taggtctagagacagctataggagaggcaaggtatcctcagtctactacctccatgacaccggataaacacatatcaactggcttcaatgggatgcatagattgtagaattagaaagacttg

SEQ ID NO: 23056 - DNA, 122 bp, Homo sapiens
  misc_feature (61)..(62): /note="This region represents a CpG dinucleotide"
  misc_feature (61)..(61): /note="Nucleotide may be methylated to form 5-methylcytosine"
tgtagtttgcctctttgcaatctggctttaaggtgctgcaggcattgaagccaccaggttcgtaaatggcaagccacaagaattttgcaaaaggtcccagaaagtgaggaagccactgaggt

SEQ ID NO: 23057 - DNA, 122 bp, Homo sapiens
  misc_feature (61)..(62): /note="This region represents a CpG dinucleotide"
  misc_feature (61)..(61): /note="Nucleotide may be methylated to form 5-methylcytosine"
ttggcctgctctcctcccacttgcttcccaaacaaggagcaaagacagacttgagcctgtcgttcagtctaacacaaccatatagggacctcagcacaaaactctctaatctgggtggccgg

SEQ ID NO: 23058 - DNA, 122 bp, Homo sapiens
  misc_feature (61)..(62): /note="This region represents a CpG dinucleotide"
  misc_feature (61)..(61): /note="Nucleotide may be methylated to form 5-methylcytosine"
ccacaggtcacgatgagtaagcactgcattgacacaggcttctccatctccatgtcaggacgtgcactcgccgatgaagtgtccacccaagatggcgacgggtgagcacgggcacgtgtggc

SEQ ID NO: 23059 - DNA, 122 bp, Homo sapiens
  misc_feature (61)..(62): /note="This region represents a CpG dinucleotide"
  misc_feature (61)..(61): /note="Nucleotide may be methylated to form 5-methylcytosine"
accaggcgtaatgaaattcctttgaagcaggacttctaaccctaatttaaaagcagtattcggattattcacatcatgtattttccacaaatggatcctcggctcaggttttcttattttat

SEQ ID NO: 23060 - DNA, 122 bp, Homo sapiens
  misc_feature (61)..(62): /note="This region represents a CpG dinucleotide"
  misc_feature (61)..(61): /note="Nucleotide may be methylated to form 5-methylcytosine"
gagctttcaggataaaaagtttttaaaataaatatgttatacttaaagctgaattgttaacgccgtctgggcaagataaaagcagcaaagagctggtaaattattttgaagatttaaaaact

SEQ ID NO: 23061 - DNA, 122 bp, Homo sapiens
  misc_feature (61)..(62): /note="This region represents a CpG dinucleotide"
  misc_feature (61)..(61): /note="Nucleotide may be methylated to form 5-methylcytosine"
ggtgaggtggggcaggctataaggccacacggcgcagaagggcggctctgtgggagagggcggctcgcagtcaacagggatgacagcccccgggctggcctcgggcagcccacatgcgcagg

SEQ ID NO: 23062 - DNA, 122 bp, Homo sapiens
  misc_feature (61)..(62): /note="This region represents a CpG dinucleotide"
  misc_feature (61)..(61): /note="Nucleotide may be methylated to form 5-methylcytosine"
ttcagttcttgctgtgcagaccgattaaaaaatgaattaccttcagcgttacaagaccaacgctgaatatcgttaaagtctttctttcttgaagtataacattttaaatactacttacactg

SEQ ID NO: 23063 - DNA, 122 bp, Homo sapiens
  misc_feature (61)..(62): /note="This region represents a CpG dinucleotide"
  misc_feature (61)..(61): /note="Nucleotide may be methylated to form 5-methylcytosine"
taaagtccttcaaatctattcatcatgaagatctttgtacaaagacaaatgacagcaatgcggtgggatgaatactatgtgcagtgatcactgttaacagcatcacataaaatcctggttgc

SEQ ID NO: 23064 - DNA, 122 bp, Homo sapiens
  misc_feature (61)..(62): /note="This region represents a CpG dinucleotide"
  misc_feature (61)..(61): /note="Nucleotide may be methylated to form 5-methylcytosine"
cagccttgagattcttgccctctctctgttacgtcagtggtggggaacctggggcagattcgcctccgtggcttctcctgcatgactgcgttgggctgagggagatatgccaggttagtgcc

SEQ ID NO: 23065 - DNA, 122 bp, Homo sapiens
  misc_feature (61)..(62): /note="This region represents a CpG dinucleotide"
  misc_feature (61)..(61): /note="Nucleotide may be methylated to form 5-methylcytosine"
gcttgcaacactaactcaggcttctagtggtctgatgagcttaaaaatcaattaataagccgggcgcggtggctcaaacctgtaatcccagcactttgggaggccgaggcgggcggatcacg

SEQ ID NO: 23066 - DNA, 122 bp, Homo sapiens
  misc_feature (61)..(62): /note="This region represents a CpG dinucleotide"
  misc_feature (61)..(61): /note="Nucleotide may be methylated to form 5-methylcytosine"
acaccatgagagaactttaactctatctaacttcaccactgcacccactctactaacaaacgtatgaacatttcctccttaaagaaaacaggcctgacacagagcagctctttgtgtttctg

SEQ ID NO: 23067 - DNA, 122 bp, Homo sapiens
  misc_feature (61)..(62): /note="This region represents a CpG dinucleotide"
  misc_feature (61)..(61): /note="Nucleotide may be methylated to form 5-methylcytosine"
aggttagcattcatttccacaggcatccatataggcctatggctagaacacctgtgtcttcggtcagtggtgtcaattgtgaccatctcattattatgaaagcatgtgtcacctatgccttt

SEQ ID NO: 23068 - DNA, 122 bp, Homo sapiens
  misc_feature (61)..(62): /note="This region represents a CpG dinucleotide"
  misc_feature (61)..(61): /note="Nucleotide may be methylated to form 5-methylcytosine"
attagatgccaggcctcgttcatgtgctcagggtacactggtaaacagacagggcatttgcgctcataggacttaacgtcctcgggtggaaggacagacggccagcatgacagatgatcagg

SEQ ID NO: 23069 - DNA, 122 bp, Homo sapiens
  misc_feature (61)..(62): /note="This region represents a CpG dinucleotide"
  misc_feature (61)..(61): /note="Nucleotide may be methylated to form 5-methylcytosine"
tgaacctgtgtgtttctgatgactcaacaattctgctcctaggtggatgcccatgagagacgtgcacatatgctcaccagttaggagatttgtcacagtgctgcttcatgacagccacagat

SEQ ID NO: 23070 - DNA, 122 bp, Homo sapiens
  misc_feature (61)..(62): /note="This region represents a CpG dinucleotide"
  misc_feature (61)..(61): /note="Nucleotide may be methylated to form 5-methylcytosine"
tgaatggcaccctagccccactgtcttctgggtggcttcaggatccttgaggaggttggccgtgtaggttcccctcaggtaggacctaggtgagctggggagtcttaactcacccagggcag

SEQ ID NO: 23071 - DNA, 122 bp, Homo sapiens
  misc_feature (61)..(62): /note="This region represents a CpG dinucleotide"
  misc_feature (61)..(61): /note="Nucleotide may be methylated to form 5-methylcytosine"
caggttactctctccctccaattctcctccctgtgtcccatggagggtggattagggtcccggatgcgaattctgcgccgcattagagttccagtcccaaccgacaccttgagcgccgttaa

SEQ ID NO: 23072 - DNA, 122 bp, Homo sapiens
  misc_feature (61)..(62): /note="This region represents a CpG dinucleotide"
  misc_feature (61)..(61): /note="Nucleotide may be methylated to form 5-methylcytosine"
cctgccatgtcatcctgttcctcttctgacacaggcaagagcagtaatgttccagttgggcgttgacttcttccaggactgggtcaacattcaggaattatgaaactagttgcctcatttcc

SEQ ID NO: 23073 - DNA, 122 bp, Homo sapiens
  misc_feature (61)..(62): /note="This region represents a CpG dinucleotide"
  misc_feature (61)..(61): /note="Nucleotide may be methylated to form 5-methylcytosine"
ggttgtgggacttgaggctttaccgggtggaggcctgtaggaggcttttctttacaaatccgtctttgcaggagaggctaaaccagggcatccctcaaataggaaattatagaatatagtca

SEQ ID NO: 23074 - DNA, 122 bp, Homo sapiens
  misc_feature (61)..(62): /note="This region represents a CpG dinucleotide"
  misc_feature (61)..(61): /note="Nucleotide may be methylated to form 5-methylcytosine"
ggcacccttattccaaaaatatcttagagcctctgccaaagatataatactcagtttccacgtctagatttactagttctatgggtatggagtttaggtgtttaacaagtctcaaagtggtt

SEQ ID NO: 23075 - DNA, 122 bp, Homo sapiens
  misc_feature (61)..(62): /note="This region represents a CpG dinucleotide"
  misc_feature (61)..(61): /note="Nucleotide may be methylated to form 5-methylcytosine"
ttaaatatattactttcctgctccttaggcaggtgctatgggacgtttatgatgatgttgcgcagtcatgtagttctgaatttgcttacggttttagttacgtcattttaaacgatcatgaa

SEQ ID NO: 23076 - DNA, 122 bp, Homo sapiens
  misc_feature (61)..(62): /note="This region represents a CpG dinucleotide"
  misc_feature (61)..(61): /note="Nucleotide may be methylated to form 5-methylcytosine"
tctgcaaagcagcgtccaggatgtgtcagctgactggggctttctcagatgtctaattgccgcattggtggcttggggctgatgggagaaaatgcagggaatagggagtgggtggattttgt

SEQ ID NO: 23077 - DNA, 122 bp, Homo sapiens
  misc_feature (61)..(62): /note="This region represents a CpG dinucleotide"
  misc_feature (61)..(61): /note="Nucleotide may be methylated to form 5-methylcytosine"
acaacccttaggaaagagtaggtgtgcacagatgagcataatctgttagttggccactcccgtatctattctaccttttcctcttagtaacagaactctaatttggagttcacacattgcag

SEQ ID NO: 23078 - DNA, 122 bp, Homo sapiens
  misc_feature (61)..(62): /note="This region represents a CpG dinucleotide"
  misc_feature (61)..(61): /note="Nucleotide may be methylated to form 5-methylcytosine"
aaagactttgttgtagcagcagttgttcactcttcaccagtggacacatttccaggccatcgggcatgtgctcacctagattaggagcctgaggtgcccctcccttcctgtgcacagatctt

SEQ ID NO: 23079 - DNA, 122 bp, Homo sapiens
  misc_feature (61)..(62): /note="This region represents a CpG dinucleotide"
  misc_feature (61)..(61): /note="Nucleotide may be methylated to form 5-methylcytosine"
aatacctttttccagaaggataagccttcagtaatggtggttatcttaacaagccagccccgacttagtgcctaatgtgtctgagatactctttcacggtcactgtcacccaaactgtgtca

SEQ ID NO: 23080 - DNA, 122 bp, Homo sapiens
  misc_feature (61)..(62): /note="This region represents a CpG dinucleotide"
  misc_feature (61)..(61): /note="Nucleotide may be methylated to form 5-methylcytosine"
tctatactttgtgctctctgcttttaaatatcctgaggctatctccactgaacacattctcgcttttactctctgatggctgcagagcactgggcttcgggaaaccataatttacttaatca

SEQ ID NO: 23081 - DNA, 122 bp, Homo sapiens
  misc_feature (61)..(62): /note="This region represents a CpG dinucleotide"
  misc_feature (61)..(61): /note="Nucleotide may be methylated to form 5-methylcytosine"
gtgaggcctacttcatctagtggttgaaacacaggtctagatttggtttcctggagtccacgtcacacccaagctgagcgagataatcacagaaacttgtcagtgttctttctcttctagca

SEQ ID NO: 23082 - DNA, 122 bp, Homo sapiens
  misc_feature (61)..(62): /note="This region represents a CpG dinucleotide"
  misc_feature (61)..(61): /note="Nucleotide may be methylated to form 5-methylcytosine"
tcatgtgacaatgaagtgagaaggcaccacctatgaaccaggaagtgggtcttcaccagacgttagattagccagtacatttaccttggacttcccagcctgcagaacagtgagaaatacat

SEQ ID NO: 23083 - DNA, 122 bp, Homo sapiens
  misc_feature (61)..(62): /note="This region represents a CpG dinucleotide"
  misc_feature (61)..(61): /note="Nucleotide may be methylated to form 5-methylcytosine"
gaagttacctctgggctcagtgagccctcactggatgcagcatttgctgttgtcatggtacgtgatgggaaggtgtgtttgagaactcagtgaaatgtgaatctagttagctgcacagcagc

SEQ ID NO: 23084 - DNA, 122 bp, Homo sapiens
  misc_feature (61)..(62): /note="This region represents a CpG dinucleotide"
  misc_feature (61)..(61): /note="Nucleotide may be methylated to form 5-methylcytosine"
gctcactgaatgtggagtctctctgactcaccctgcacagcccaggaagccagattagggcggaaaaaggtattcagagtttgctgaggctagtggtggtcaggctgtgtgggaactctgga

SEQ ID NO: 23085 - DNA, 122 bp, Homo sapiens
  misc_feature (61)..(62): /note="This region represents a CpG dinucleotide"
  misc_feature (61)..(61): /note="Nucleotide may be methylated to form 5-methylcytosine"
ttcatactacatgtagattttaatgagtcagcacagcctgctaaaccaagcttctggcaccgagagcctttttaaaactcatctaaacactattattgatcattcacaagtggtggttaaat

SEQ ID NO: 23086 - DNA, 122 bp, Homo sapiens
  misc_feature (61)..(62): /note="This region represents a CpG dinucleotide"
  misc_feature (61)..(61): /note="Nucleotide may be methylated to form 5-methylcytosine"
tgacgggaaatcaattaatcttgatgtattattttatgcagaacagggtgcaagaacctgcggagagaatggctacagctgttcttgttggtcaggccatatattatcgttggcgggtttga

SEQ ID NO: 23087 - DNA, 122 bp, Homo sapiens
  misc_feature (61)..(62): /note="This region represents a CpG dinucleotide"
  misc_feature (61)..(61): /note="Nucleotide may be methylated to form 5-methylcytosine"
tgcttttctgtgtgagtcaacgtggtgatgattaatggagcatcctcacttacacagccacgcttgaaggcagttccaatgagtagatttatgatgcatggcagaagttaattaattaagca

SEQ ID NO: 23088 - DNA, 122 bp, Homo sapiens
  misc_feature (61)..(62): /note="This region represents a CpG dinucleotide"
  misc_feature (61)..(61): /note="Nucleotide may be methylated to form 5-methylcytosine"
caagccacaggagggcttcagcctgaagctcagaggtgatgtgcttagatgtcacagagccgggaggggaacaggctgggctgcagagaggaggccaggcacagtcacctcgtgttgctgtc

SEQ ID NO: 23089 - DNA, 122 bp, Homo sapiens
  misc_feature (61)..(62): /note="This region represents a CpG dinucleotide"
  misc_feature (61)..(61): /note="Nucleotide may be methylated to form 5-methylcytosine"
cagacttggctgccagagcccttggttgctgagtttagtgatcagtcacagtaaccagttcgtcccaggtacatctggtgctcctaatagatgtctggcctggcatctgcttttatgttttg

SEQ ID NO: 23090 - DNA, 122 bp, Homo sapiens
  misc_feature (61)..(62): /note="This region represents a CpG dinucleotide"
  misc_feature (61)..(61): /note="Nucleotide may be methylated to form 5-methylcytosine"
taagaggacacacacagttacaacccctgtcattcaagggttgactgcactgtaagtcatcgctggattactcataacaccaaagacaacacccacacaccccttcattcccgtggattcag

SEQ ID NO: 23091 - DNA, 122 bp, Homo sapiens
  misc_feature (61)..(62): /note="This region represents a CpG dinucleotide"
  misc_feature (61)..(61): /note="Nucleotide may be methylated to form 5-methylcytosine"
agcataaactgaggcagctgttaagcagttcgaaagctgaaagcgatttaagtctgcccccgcccccccccgccctccgccccgcccccgccctccgccccgcgtgtagggtcttgttgctc

SEQ ID NO: 23092 - DNA, 122 bp, Homo sapiens
  misc_feature (61)..(62): /note="This region represents a CpG dinucleotide"
  misc_feature (61)..(61): /note="Nucleotide may be methylated to form 5-methylcytosine"
ttttaaacaaactgggagggagggtcaggtgggcgactctttgaatgacacagctcccttcgtatgaacgagctcttcctggtttcgttgctcagtttatttgccaggtagcagactcctag

SEQ ID NO: 23093 - DNA, 122 bp, Homo sapiens
  misc_feature (61)..(62): /note="This region represents a CpG dinucleotide"
  misc_feature (61)..(61): /note="Nucleotide may be methylated to form 5-methylcytosine"
tcctttcagttacccaagtaactgccattcataaatgcctgagttgtggttgcatttacccgtgtgcagagaaactgaccacaagactttcaggactcagaggactgaattgaggggtggct

SEQ ID NO: 23094 - DNA, 122 bp, Homo sapiens
  misc_feature (61)..(62): /note="This region represents a CpG dinucleotide"
  misc_feature (61)..(61): /note="Nucleotide may be methylated to form 5-methylcytosine"
gctcctgggccgttttactgttttccttggattgaatttcagccttctcctatatcttgacgagtgagcttccttgctgtctggattctgaattctatgtctgtcatttcagccattttagt

SEQ ID NO: 23095 - DNA, 122 bp, Homo sapiens
  misc_feature (61)..(62): /note="This region represents a CpG dinucleotide"
  misc_feature (61)..(61): /note="Nucleotide may be methylated to form 5-methylcytosine"
gggtcaagtcaacttctgtggagtgatttgtgtgtttctcacgatatgcaaacagacatgcgtacaaaaagaaacatgtacatgctgcatagttagcatagaggaggaagtggttagtgctg

SEQ ID NO: 23096 - DNA, 122 bp, Homo sapiens
  misc_feature (61)..(62): /note="This region represents a CpG dinucleotide"
  misc_feature (61)..(61): /note="Nucleotide may be methylated to form 5-methylcytosine"
tccaagtgcagactcattactgatacacaaggaaaaattgtaccacatggggtggaagaacgaagggagaacttgaccaagctcccatctagaaacacacaagataggtgaacaatggccaa

SEQ ID NO: 23097 - DNA, 122 bp, Homo sapiens
  misc_feature (61)..(62): /note="This region represents a CpG dinucleotide"
  misc_feature (61)..(61): /note="Nucleotide may be methylated to form 5-methylcytosine"
ttcctcttcagtgacaacctctgcttcttgttggctgtttagcttccagacttttatctacgcatttacatacatgtagaggtaaacacaaaaccatgttattattttaaaaaggaatgtac

SEQ ID NO: 23098 - DNA, 122 bp, Homo sapiens
  misc_feature (61)..(62): /note="This region represents a CpG dinucleotide"
  misc_feature (61)..(61): /note="Nucleotide may be methylated to form 5-methylcytosine"
gttactagtgtaatttggagcctcatgaaccacacccatacgatggtgaacataaatgcacgtgttctgattgctccacaaacaggctgttccctctctccgtctccttaggcctctgtatt

SEQ ID NO: 23099 - DNA, 122 bp, Homo sapiens
  misc_feature (61)..(62): /note="This region represents a CpG dinucleotide"
  misc_feature (61)..(61): /note="Nucleotide may be methylated to form 5-methylcytosine"
aagtcactgtgcctggctcaacaacacaatcttattacattattaaaagatcactctagccgctgtgctaagaatggattgtgtaggaggtaaggggagaagtggagagaatgttgcaatag

SEQ ID NO: 23100 - DNA, 122 bp, Homo sapiens
  misc_feature (61)..(62): /note="This region represents a CpG dinucleotide"
  misc_feature (61)..(61): /note="Nucleotide may be methylated to form 5-methylcytosine"
cttctggagagtgcactgtttgtggaacttttctagagtggcaaaaacgatctccactgtcggtgaaagggcagttcctgaagtcagctcatggtcctggctccccttctccccagcagtga

SEQ ID NO: 23101 - DNA, 122 bp, Homo sapiens
  misc_feature (61)..(62): /note="This region represents a CpG dinucleotide"
  misc_feature (61)..(61): /note="Nucleotide may be methylated to form 5-methylcytosine"
gattgtattacgctctgcacatagagcaggaaaatcccacttatcatgtaatcatacacacgtgttatcccatgtgtgtgaagctcagcctacagcctgagattccacagctaaaatcaaag

SEQ ID NO: 23102 - DNA, 122 bp, Homo sapiens
  misc_feature (61)..(62): /note="This region represents a CpG dinucleotide"
  misc_feature (61)..(61): /note="Nucleotide may be methylated to form 5-methylcytosine"
acactccctgcctcctagaagagactagaatgcttaaggcatttgcccaaggtcacttagcgctttagttaatgatgaagctgatgttcaagcccaagtctgcctgaggacagaacctgtgc

SEQ ID NO: 23103 - DNA, 122 bp, Homo sapiens
  misc_feature (61)..(62): /note="This region represents a CpG dinucleotide"
  misc_feature (61)..(61): /note="Nucleotide may be methylated to form 5-methylcytosine"
agtaaattaccagctgggatcctgttgataacaagcttgcaggaaactcactgaagtcaacgtgtaaacacagagatgtgggcagagatatgccggtagtaccgtcgggaccaggcccagga

SEQ ID NO: 23104 - DNA, 122 bp, Homo sapiens
  misc_feature (61)..(62): /note="This region represents a CpG dinucleotide"
  misc_feature (61)..(61): /note="Nucleotide may be methylated to form 5-methylcytosine"
tttgattccgctattgaggtagaggcgggacgggggaagcagctttcagtaagacccgcccgctcttgccctgtcagtttaccattgccatggcaacacccggaagttgccgccccctttcc

SEQ ID NO: 23105 - DNA, 122 bp, Homo sapiens
  misc_feature (61)..(62): /note="This region represents a CpG dinucleotide"
  misc_feature (61)..(61): /note="Nucleotide may be methylated to form 5-methylcytosine"
tcattgctctggcaatcaggcttaattagacctctgatccatggcttagtcatagtcaagcgtgtactgcaggtcactattatgagagctttaagcaaagtttaaaacttacagccacaaaa

SEQ ID NO: 23106 - DNA, 122 bp, Homo sapiens
  misc_feature (61)..(62): /note="This region represents a CpG dinucleotide"
  misc_feature (61)..(61): /note="Nucleotide may be methylated to form 5-methylcytosine"
tcaatccacatgcttcttccccagacctccttaactgcaattttgcagtcttgctcttcacgagtccctgagcaatcagctgaactgttcactactgcctgggattcctgacctcaggccac

SEQ ID NO: 23107 - DNA, 122 bp, Homo sapiens
  misc_feature (61)..(62): /note="This region represents a CpG dinucleotide"
  misc_feature (61)..(61): /note="Nucleotide may be methylated to form 5-methylcytosine"
aacagaacagtggttgtaaccacaattatggtaagtgttggtctatgctttatggtgttccgttttgtccacaggcaattttaactccccagcgacggtgaacagggagggcaaagctgact

SEQ ID NO: 23108 - DNA, 122 bp, Homo sapiens
  misc_feature (61)..(62): /note="This region represents a CpG dinucleotide"
  misc_feature (61)..(61): /note="Nucleotide may be methylated to form 5-methylcytosine"
tttctgttaggggattggctccagctccattgtccctcccccatcattcagtagtctccgcgaaagcccttagagccggtgttgctccacaggaagccaagaagcacacaggaaaaggagct

SEQ ID NO: 23109 - DNA, 122 bp, Homo sapiens
  misc_feature (61)..(62): /note="This region represents a CpG dinucleotide"
  misc_feature (61)..(61): /note="Nucleotide may be methylated to form 5-methylcytosine"
cttatgctgtggccagcagaggcattcaaacattccgtcagcaggattccagccaacctccgaagctcacttttataagccagccccaggcatcccagagcaagatgtagctgtgtagtctc

SEQ ID NO: 23110 - DNA, 122 bp, Homo sapiens
  misc_feature (61)..(62): /note="This region represents a CpG dinucleotide"
  misc_feature (61)..(61): /note="Nucleotide may be methylated to form 5-methylcytosine"
gtacttcttctttggcaaaactacatctttccttggtgcagtggaccacaacctgcttcacgaggcatctgcagaaggagctaaccccaaacgcccactgtgctgataaatttatgctagaa

SEQ ID NO: 23111 - DNA, 122 bp, Homo sapiens
  misc_feature (61)..(62): /note="This region represents a CpG dinucleotide"
  misc_feature (61)..(61): /note="Nucleotide may be methylated to form 5-methylcytosine"
agtggcagagccaggtctagactcctagtgcctgactcaccgctgttctctctaccctagcgactccaagtgcatcagcataggcattgccaggagctcatgaggaatgcagactgtcaggt

SEQ ID NO: 23112 - DNA, 122 bp, Homo sapiens
  misc_feature (61)..(62): /note="This region represents a CpG dinucleotide"
  misc_feature (61)..(61): /note="Nucleotide may be methylated to form 5-methylcytosine"
gccatattcagattaaactcaacatttcagggcacaaagaacagaggaactcaaggaagccgactcaccaggttctccaaggcagatcagtgctcaggtaccaggggtttaagagtcgtgca

SEQ ID NO: 23113 - DNA, 122 bp, Homo sapiens
  misc_feature (61)..(62): /note="This region represents a CpG dinucleotide"
  misc_feature (61)..(61): /note="Nucleotide may be methylated to form 5-methylcytosine"
taaggagtctagggcttagagaactgtcttgccccaggtaatagcaaaatagaggcagagcggagacaggttttctgacgataagcctagtgtttctgccagcacaccatcaataagcagat

SEQ ID NO: 23114 - DNA, 122 bp, Homo sapiens
  misc_feature (61)..(62): /note="This region represents a CpG dinucleotide"
  misc_feature (61)..(61): /note="Nucleotide may be methylated to form 5-methylcytosine"
aactggtcagtcatcagataaactcttccaattgttcacatgttcctcaacaggataccacgtaatagactgacagctcatcagtcttcaatgaggatagggaaatgtctccctccagccat

SEQ ID NO: 23115 - DNA, 122 bp, Homo sapiens
  misc_feature (61)..(62): /note="This region represents a CpG dinucleotide"
  misc_feature (61)..(61): /note="Nucleotide may be methylated to form 5-methylcytosine"
atatgaacttctgagaaaagagaaaatcccatgttgtacccgactctaataggccaggaacgagctttgccattggaatgtggcagtcctgcctctgcaggtttgttttgctgatagaaggt

SEQ ID NO: 23116 - DNA, 122 bp, Homo sapiens
  misc_feature (61)..(62): /note="This region represents a CpG dinucleotide"
  misc_feature (61)..(61): /note="Nucleotide may be methylated to form 5-methylcytosine"
cctttgatccttctggatgagggtggctcccaggctgcagggcaccctcaggtgggtgagcgctcacactcccgtcccacttggccaggactcctttccatggctctgcagcttgttcccac

SEQ ID NO: 23117 - DNA, 122 bp, Homo sapiens
  misc_feature (61)..(62): /note="This region represents a CpG dinucleotide"
  misc_feature (61)..(61): /note="Nucleotide may be methylated to form 5-methylcytosine"
cacctggacgagcagttcacggtgcccgtggaaatgatgcaggcccgcacgtacccgctgcgctggttcttgctggagcagcctgagatccaggtcacccttggttgtccagcaggctgggc

SEQ ID NO: 23118 - DNA, 122 bp, Homo sapiens
  misc_feature (61)..(62): /note="This region represents a CpG dinucleotide"
  misc_feature (61)..(61): /note="Nucleotide may be methylated to form 5-methylcytosine"
taacagtgctcttttgtagatgatgaaacagaacactggtgattaatgatcataagatcacggaaacaatgttgctagcagaaatcaggactatatgatgtctgcgatgtggcaccttacag

SEQ ID NO: 23119 - DNA, 122 bp, Homo sapiens
  misc_feature (61)..(62): /note="This region represents a CpG dinucleotide"
  misc_feature (61)..(61): /note="Nucleotide may be methylated to form 5-methylcytosine"
cctctggtgatctccagataaccaccggtatgcaggtggttcccatggttgtatctctagcgcagatctttctcccaggttccaggctcatatccaactctcttctcactgtctccactttg

SEQ ID NO: 23120 - DNA, 122 bp, Homo sapiens
  misc_feature (61)..(62): /note="This region represents a CpG dinucleotide"
  misc_feature (61)..(61): /note="Nucleotide may be methylated to form 5-methylcytosine"
agaggtgctcagaagcccacgggtagactttgctgctgagactagcccttgtggatgcagcgcatcaacacatgcctcatgggtgaggtgagccagtattcagggttgaacacgtgttcagc

SEQ ID NO: 23121 - DNA, 122 bp, Homo sapiens
  misc_feature (61)..(62): /note="This region represents a CpG dinucleotide"
  misc_feature (61)..(61): /note="Nucleotide may be methylated to form 5-methylcytosine"
aatgcactgtatttccttgtactccagatccctattagtgaaatgcctattaaaacatttcgtaaggccagcatggcagtgtgcatcagtagtcccatctatttgggaggatggcttgaggc

SEQ ID NO: 23122 - DNA, 122 bp, Homo sapiens
  misc_feature (61)..(62): /note="This region represents a CpG dinucleotide"
  misc_feature (61)..(61): /note="Nucleotide may be methylated to form 5-methylcytosine"
accctgcgcccgcggttgagcaatgatctgcgtggtcagagtttgtgactgcggtggtctcgggggcgcagggctgtccgccatgtgaggcatggctcttcttcccaagaaagccagtcacg

SEQ ID NO: 23123 - DNA, 122 bp, Homo sapiens
  misc_feature (61)..(62): /note="This region represents a CpG dinucleotide"
  misc_feature (61)..(61): /note="Nucleotide may be methylated to form 5-methylcytosine"
tctatgtcttaaaaccagctcattcatcccgcagcttcatcccactggatgcccaagtcccgagagccagacataattccccaggttaatccaagccagactgggaagcatgggagaaaact

SEQ ID NO: 23124 - DNA, 122 bp, Homo sapiens
  misc_feature (61)..(62): /note="This region represents a CpG dinucleotide"
  misc_feature (61)..(61): /note="Nucleotide may be methylated to form 5-methylcytosine"
ttcaagtgtttctcaatctgtttttcttcatatagaaattatggctatatttctgtccagcgcaaatctctgagccaacttgggcttttggttattctagacaggttttccgtaactccacc

SEQ ID NO: 23125 - DNA, 122 bp, Homo sapiens
  misc_feature (61)..(62): /note="This region represents a CpG dinucleotide"
  misc_feature (61)..(61): /note="Nucleotide may be methylated to form 5-methylcytosine"
aaaaagggaagtggccaattctccaggtcagcggtgagcgtttatgtggtattgctcttccgcctcctttgagaaagggagtttcatgcaaaccttcaaagggcctgccttctaaagaagag

SEQ ID NO: 23126 - DNA, 122 bp, Homo sapiens
  misc_feature (61)..(62): /note="This region represents a CpG dinucleotide"
  misc_feature (61)..(61): /note="Nucleotide may be methylated to form 5-methylcytosine"
ggaacttcatgcactccaatcttgctgagaaaaagtgaggctgaagagtcaggcaggatgcgataacaaagccttactaagacgcctgggatttagcctgcaggcaggcagtgggaaggcaa

SEQ ID NO: 23127 - DNA, 122 bp, Homo sapiens
  misc_feature (61)..(62): /note="This region represents a CpG dinucleotide"
  misc_feature (61)..(61): /note="Nucleotide may be methylated to form 5-methylcytosine"
cagtccttagtttttgctttctatctcattttcattgagaatttaaagtggaatttataacgaatttgtcagacctggtaagcatttgatatatgctagtttagtgactaaccaaacccaac

SEQ ID NO: 23128 - DNA, 122 bp, Homo sapiens
  misc_feature (61)..(62): /note="This region represents a CpG dinucleotide"
  misc_feature (61)..(61): /note="Nucleotide may be methylated to form 5-methylcytosine"
gcccatgcagctgacaggctctgcacaatcctgtaaactattgacaaatttcacctgttacgtaactaggagcactttatcagactatcttccatgtatctgatataaaaaccacagtcaag

SEQ ID NO: 23129 - DNA, 122 bp, Homo sapiens
  misc_feature (61)..(62): /note="This region represents a CpG dinucleotide"
  misc_feature (61)..(61): /note="Nucleotide may be methylated to form 5-methylcytosine"
caattcctgcacagctctgagcaccgggccaggttcaaagtacaatcatgcattgcctaacgatgcagatgcattctgaaaacagaatccttaggtgattttgtcgctctgtgaactctgta

SEQ ID NO: 23130 - DNA, 122 bp, Homo sapiens
  misc_feature (61)..(62): /note="This region represents a CpG dinucleotide"
  misc_feature (61)..(61): /note="Nucleotide may be methylated to form 5-methylcytosine"
ttcagactctgctttgaatgtccccttctggtcctttaaatggtctatttccctaccttacgtaagtttccatgagctcatcttgttttcatagtgttcccttttattgttaagagaaacaa

SEQ ID NO: 23131 - DNA, 122 bp, Homo sapiens
  misc_feature (61)..(62): /note="This region represents a CpG dinucleotide"
  misc_feature (61)..(61): /note="Nucleotide may be methylated to form 5-methylcytosine"
acctcaggtgatccacccgcctcggcctcccagtgtgctgggattacaggcatgagccaccgcacccggcccaacatgtccgtattctcaaagctatagaggtgtctttgctattttgttct

SEQ ID NO: 23132 - DNA, 122 bp, Homo sapiens
  misc_feature (61)..(62): /note="This region represents a CpG dinucleotide"
  misc_feature (61)..(61): /note="Nucleotide may be methylated to form 5-methylcytosine"
cccagccagcgagggagtcagggcctcccaacagagctaagcggtgccaagggaccaggtcgaggacaaaaggtttatttgatgtgaggcattagcacctactagcaccttactgtagggag

SEQ ID NO: 23133 - DNA, 122 bp, Homo sapiens
  misc_feature (61)..(62): /note="This region represents a CpG dinucleotide"
  misc_feature (61)..(61): /note="Nucleotide may be methylated to form 5-methylcytosine"
acccagcccccagccctcctagagacagaggctttgcggggggtgtctaatttctgtccccggaaacctctgaccaccaacttccccatttcaggaaaaagcctggtgtgggtggggtgggg

SEQ ID NO: 23134 - DNA, 122 bp, Homo sapiens
  misc_feature (61)..(62): /note="This region represents a CpG dinucleotide"
  misc_feature (61)..(61): /note="Nucleotide may be methylated to form 5-methylcytosine"
taataaatgttatcttagaagccagactgccaggttcccataaccatttcagccgttcaccggctggctgttgtcatcttggtcaaattatccctctgcgcctcagtttcctcatctgtgca

SEQ ID NO: 23135 - DNA, 122 bp, Homo sapiens
  misc_feature (61)..(62): /note="This region represents a CpG dinucleotide"
  misc_feature (61)..(61): /note="Nucleotide may be methylated to form 5-methylcytosine"
tcagcagcccccgagtgttgtattctcctaacccatgtgcatgtcttccatggggaagatcgttttgaaatcagttctttcctcctttaaaggtaaacataagtcgtggggatctcagtgag

SEQ ID NO: 23136 - DNA, 122 bp, Homo sapiens
  misc_feature (61)..(62): /note="This region represents a CpG dinucleotide"
  misc_feature (61)..(61): /note="Nucleotide may be methylated to form 5-methylcytosine"
aggattgttcttttgtttgttgttgttctcctttcctccccctattttctcttcagaggacgtgagacttcacaaccttctaaaaatgagctttcctagcaactagggacttacctgtctag

SEQ ID NO: 23137 - DNA, 122 bp, Homo sapiens
  misc_feature (61)..(62): /note="This region represents a CpG dinucleotide"
  misc_feature (61)..(61): /note="Nucleotide may be methylated to form 5-methylcytosine"
catcttggaatattttataacaatataaataagattctggtttgcttttccttttcgtctcgtaaaggagagagaagtgcagagttcgattctgtacaagggggcagcggcagaaggccggc

SEQ ID NO: 23138 - DNA, 122 bp, Homo sapiens
  misc_feature (61)..(62): /note="This region represents a CpG dinucleotide"
  misc_feature (61)..(61): /note="Nucleotide may be methylated to form 5-methylcytosine"
tgtgtaccacagtggttacaaatagtggttttggaatcaaactgattgtgtcgaaatctccgatgaagcatttactagttgtgcaaccttgaatgcattacttacccgctctgaacatcagt

SEQ ID NO: 23139 - DNA, 122 bp, Homo sapiens
  misc_feature (61)..(62): /note="This region represents a CpG dinucleotide"
  misc_feature (61)..(61): /note="Nucleotide may be methylated to form 5-methylcytosine"
ccatcagcaaggacaattcttgagacagggtgcagctgtgagctgttggcaacctatgctcgtagcacctggaaaatggggatatgatttgtcctcactaaactcatgttgaaatttgatcc

SEQ ID NO: 23140 - DNA, 122 bp, Homo sapiens
  misc_feature (61)..(62): /note="This region represents a CpG dinucleotide"
  misc_feature (61)..(61): /note="Nucleotide may be methylated to form 5-methylcytosine"
gtcttaaaaaaataataatacagatgacatctctaatcactatgcaatctaatttaaagacgagtgacaggactaggggaaattctctagcacagcaaaatttaaaaactcttgggtacaag

SEQ ID NO: 23141 - DNA, 122 bp, Homo sapiens
  misc_feature (61)..(62): /note="This region represents a CpG dinucleotide"
  misc_feature (61)..(61): /note="Nucleotide may be methylated to form 5-methylcytosine"
tgcctaaagtcacacagccatctgggtagtgacaggattagaaaccaggtttcctgcccccgggccagtggtgcatacattggtgccaccttgataacagatacaaacagatctctttgaca

SEQ ID NO: 23142 - DNA, 122 bp, Homo sapiens
  misc_feature (61)..(62): /note="This region represents a CpG dinucleotide"
  misc_feature (61)..(61): /note="Nucleotide may be methylated to form 5-methylcytosine"
ggagggcagatgctgcttgttctcaaatggcacttgggttgtgtggaggctctgcatagccgctgtacttaaatgccagaaatagatttttaaggggtttgtgctgataactgccatttgga

SEQ ID NO: 23143 - DNA, 122 bp, Homo sapiens
  misc_feature (61)..(62): /note="This region represents a CpG dinucleotide"
  misc_feature (61)..(61): /note="Nucleotide may be methylated to form 5-methylcytosine"
cagcccaagataggggggagagtctgaccatctccccttttcccagtggggtgcaatgtacgcaagtaggccctgggcataactctgcctgtaggtgtgtccagttctgtgtagcagatttg

SEQ ID NO: 23144 - DNA, 122 bp, Homo sapiens
  misc_feature (61)..(62): /note="This region represents a CpG dinucleotide"
  misc_feature (61)..(61): /note="Nucleotide may be methylated to form 5-methylcytosine"
caattagcaatatcaaacttttgcttctgttcaggtctgtccaaggtatggggacatttccgaagtcaggagaattaaaaaaaaaaaaaaaaagccagagtttggctgctcagcatcagtgc

SEQ ID NO: 23145 - DNA, 122 bp, Homo sapiens
  misc_feature (61)..(62): /note="This region represents a CpG dinucleotide"
  misc_feature (61)..(61): /note="Nucleotide may be methylated to form 5-methylcytosine"
tgaattgaattctctttttcttgcaagctagcatagattggttcttccctcatagctagccgtatgactccttctcattgagatcacccagccatatctcctcaattctttatttcccacat

SEQ ID NO: 23146 - DNA, 122 bp, Homo sapiens
  misc_feature (61)..(62): /note="This region represents a CpG dinucleotide"
  misc_feature (61)..(61): /note="Nucleotide may be methylated to form 5-methylcytosine"
tataaggctatttcatcattctagagtagctggattcactgcctttctgcgctctggagacgtttctgaataaaaagtactggttctcagaatttgagggctctcaccctggcacagtgctt

SEQ ID NO: 23147 - DNA, 122 bp, Homo sapiens
  misc_feature (61)..(62): /note="This region represents a CpG dinucleotide"
  misc_feature (61)..(61): /note="Nucleotide may be methylated to form 5-methylcytosine"
aagaagagggatttttctcaagatagtggagaattgaacaaatttaaaggttggtgggaacgacacagtaaagaggaagaggtttaagataagagaaagcaaaaagataatcaacaccggga

SEQ ID NO: 23148 - DNA, 122 bp, Homo sapiens
  misc_feature (61)..(62): /note="This region represents a CpG dinucleotide"
  misc_feature (61)..(61): /note="Nucleotide may be methylated to form 5-methylcytosine"
aataggaattgagtttgcaaggttgaggctggagatgaaaaactagagaaagcgtaactacgatagctgaagagacaagaagaattgccaaaggatagtgaaataataataatattcggcta

SEQ ID NO: 23149 - DNA, 122 bp, Homo sapiens
  misc_feature (61)..(62): /note="This region represents a CpG dinucleotide"
  misc_feature (61)..(61): /note="Nucleotide may be methylated to form 5-methylcytosine"
gcctccatctttttttacatcctgggggcatggccataaccgcttagcaaagctttgtttcgcaatcctgccttagggagtaagtttctccctggtttaatatctgcctgttctcccagccc

SEQ ID NO: 23150 - DNA, 122 bp, Homo sapiens
  misc_feature (61)..(62): /note="This region represents a CpG dinucleotide"
  misc_feature (61)..(61): /note="Nucleotide may be methylated to form 5-methylcytosine"
aaaagtacagtcaaggccttgtactgcctggatcctatactcaaaaagttaattctatctcgcaatatatatttaatacaattcagttaagcttcctctaaataattcatttagtttagttt

SEQ ID NO: 23151 - DNA, 122 bp, Homo sapiens
  misc_feature (61)..(62): /note="This region represents a CpG dinucleotide"
  misc_feature (61)..(61): /note="Nucleotide may be methylated to form 5-methylcytosine"
tacctcattggccagagattagtcacagaaccacacctggctctgcaagggaggagggaacgtcctgattccaaaaggccatgtatccagctaaaacccagggggagccttttaaaattatt

SEQ ID NO: 23152 - DNA, 122 bp, Homo sapiens
  misc_feature (61)..(62): /note="This region represents a CpG dinucleotide"
  misc_feature (61)..(61): /note="Nucleotide may be methylated to form 5-methylcytosine"
attaaggataagtgctgtgctttacacatattttatttactctcaataataatcatttgccgtgggcatggtaagttaatatttaagatggggaacctaagaattagacaataagtgatttg

SEQ ID NO: 23153 - DNA, 122 bp, Homo sapiens
  misc_feature (61)..(62): /note="This region represents a CpG dinucleotide"
  misc_feature (61)..(61): /note="Nucleotide may be methylated to form 5-methylcytosine"
ttgaaagcccaagagatcagcagcctatgccaggaatgaggctctctctggaggcaaggccgagagcagtggccggtcactggctgcacagcccagagcagataccacagagccagggctca

SEQ ID NO: 23154 - DNA, 122 bp, Homo sapiens
  misc_feature (61)..(62): /note="This region represents a CpG dinucleotide"
  misc_feature (61)..(61): /note="Nucleotide may be methylated to form 5-methylcytosine"
tacccctgcaggcagcacttgtgtgcatgcctgtctccacacagcacacacatgtacacacgtgtgcacatatgtatcatcagggatgtttaacctccacaagtttcccagtctccagggcc

SEQ ID NO: 23155 - DNA, 122 bp, Homo sapiens
  misc_feature (61)..(62): /note="This region represents a CpG dinucleotide"
  misc_feature (61)..(61): /note="Nucleotide may be methylated to form 5-methylcytosine"
cacacaaacagttcggaaagttaagactagcatttaagcgcacacacacaaagaagtacacgcatgaacaggaagtatctaaaggacacttggaattgtttcaggtgcatacttgtaaatat

SEQ ID NO: 23156 - DNA, 122 bp, Homo sapiens
  misc_feature (61)..(62): /note="This region represents a CpG dinucleotide"
  misc_feature (61)..(61): /note="Nucleotide may be methylated to form 5-methylcytosine"
atgcttaaaaaaatccaatgttgcaataaccatttctttccctgattggggaaactacatcgaaaaaatgggtaaaatgttgaattatgcaatattcaagttgcacggaaacctcaaatttc

SEQ ID NO: 23157 - DNA, 122 bp, Homo sapiens
  misc_feature (61)..(62): /note="This region represents a CpG dinucleotide"
  misc_feature (61)..(61): /note="Nucleotide may be methylated to form 5-methylcytosine"
gcaggaatatttggaagcagtcctgaaaccataacttcacttgtgacacaatcccttttccgtaactctggccaaacagtctaactctctaaggaaccaagagtcaagcaacctcttcctct

SEQ ID NO: 23158 - DNA, 122 bp, Homo sapiens
  misc_feature (61)..(62): /note="This region represents a CpG dinucleotide"
  misc_feature (61)..(61): /note="Nucleotide may be methylated to form 5-methylcytosine"
agtgtacacacatatctgaaacatgcaccaagagctgagccagcaacaccagtgccaccccgagcagcagccaggggcctcactctcctggtgagagctgacctgtccctgctgggtattcc

SEQ ID NO: 23159 - DNA, 122 bp, Homo sapiens
  misc_feature (61)..(62): /note="This region represents a CpG dinucleotide"
  misc_feature (61)..(61): /note="Nucleotide may be methylated to form 5-methylcytosine"
ttctctggccttgctgagctgggctttggcttcgagtctcctctcaggcagacctggatacgtcttcattcatgtgcctattttagtcattgcaaaatgctttataataattccagacgtga

SEQ ID NO: 23160 - DNA, 122 bp, Homo sapiens
  misc_feature (61)..(62): /note="This region represents a CpG dinucleotide"
  misc_feature (61)..(61): /note="Nucleotide may be methylated to form 5-methylcytosine"
agcaagatcacagagattaagtgccattttcttgcatcatatcatgatacagactatgaacgtgactcatcatggttgatggcctggtcatctggctgacacagtgtttatcatatttctcc

SEQ ID NO: 23161 - DNA, 122 bp, Homo sapiens
  misc_feature (61)..(62): /note="This region represents a CpG dinucleotide"
  misc_feature (61)..(61): /note="Nucleotide may be methylated to form 5-methylcytosine"
caacttggagttgtgacaagttaaggagaaaagctagtgataggagacaaagggctgcttcgctttactcaatgctcagtgagtcatgaggtggctgcccccaggcctccaagttgtcactt

SEQ ID NO: 23162 - DNA, 122 bp, Homo sapiens
  misc_feature (61)..(62): /note="This region represents a CpG dinucleotide"
  misc_feature (61)..(61): /note="Nucleotide may be methylated to form 5-methylcytosine"
caccccagggtcccccttccagcagatgcagagcacccttctccctgcaaggcctgagagcggctgccatgggccgtcttgagctgtgtgacatccctgtaccaatcctaggagctgggagt

SEQ ID NO: 23163 - DNA, 122 bp, Homo sapiens
  misc_feature (61)..(62): /note="This region represents a CpG dinucleotide"
  misc_feature (61)..(61): /note="Nucleotide may be methylated to form 5-methylcytosine"
atagcaaaccaacctcagatttcaattttgtcaaggatgatacaagaactagtagtgtctcggtgactgtggtctactcagagctccatcacagctaccctgagcccaaggcagtcaggtgt

SEQ ID NO: 23164 - DNA, 122 bp, Homo sapiens
  misc_feature (61)..(62): /note="This region represents a CpG dinucleotide"
  misc_feature (61)..(61): /note="Nucleotide may be methylated to form 5-methylcytosine"
tggcagtgcaaccggcccagtgccaagcatggcccggagaagctgtctgagaagttccagcgcttcacacctttcaccctgggcaaggagttcaaagaaggacacagctactactacatctg

SEQ ID NO: 23165 - DNA, 122 bp, Homo sapiens
  misc_feature (61)..(62): /note="This region represents a CpG dinucleotide"
  misc_feature (61)..(61): /note="Nucleotide may be methylated to form 5-methylcytosine"
gtcaactctgagtcagccaaacagctgaggtcattctctacttgtcaccaccgatgaggacggagagccaacaccaccagtcagtcacccaagctggaaatttaagcatcatcatttcttct

SEQ ID NO: 23166 - DNA, 122 bp, Homo sapiens
  misc_feature (61)..(62): /note="This region represents a CpG dinucleotide"
  misc_feature (61)..(61): /note="Nucleotide may be methylated to form 5-methylcytosine"
tacccctccctctcttccctctgcaagtcaaaaagcaagccacagtgctaaacaggaagacggtcacaggacagtgtttatggtaaaaccaaagtatctcagagattggatattttgcaata

SEQ ID NO: 23167 - DNA, 122 bp, Homo sapiens
  misc_feature (61)..(62): /note="This region represents a CpG dinucleotide"
  misc_feature (61)..(61): /note="Nucleotide may be methylated to form 5-methylcytosine"
ctgcacagagtgaggagtgctggactatgagttgatgtgaatggatttggaaatggcccacgagaggcatccaacacaattagaaaccttgctccaggtgttgactgagatttaaatattaa

SEQ ID NO: 23168 - DNA, 122 bp, Homo sapiens
  misc_feature (61)..(62): /note="This region represents a CpG dinucleotide"
  misc_feature (61)..(61): /note="Nucleotide may be methylated to form 5-methylcytosine"
atgatgcacacaaaatcctgagacaaagaccatctcaggcaagtcctgtagagcaggttgcgcacttccctgaaaagactagtcacagtcaattctcactccccaggagacccattgtagtt

SEQ ID NO: 23169 - DNA, 122 bp, Homo sapiens
  misc_feature (61)..(62): /note="This region represents a CpG dinucleotide"
  misc_feature (61)..(61): /note="Nucleotide may be methylated to form 5-methylcytosine"
caagatgtacaaatgccttattttctctgccctggtctgccctactcattcataaacaaacgtgtgaatgccgtttaagaagctaaggccaaggcaagcttatttcctctctccatatacta

SEQ ID NO: 23170 - DNA, 122 bp, Homo sapiens
  misc_feature (61)..(62): /note="This region represents a CpG dinucleotide"
  misc_feature (61)..(61): /note="Nucleotide may be methylated to form 5-methylcytosine"
gtccctgggacgtgagggagggggtggaccctgagcccggaagtcaaggcaccgcctcctcgccccaaaatcttccctgcaagcccagcgacccctgcaaacgctgcctgtttctgccaggg

SEQ ID NO: 23171 - DNA, 122 bp, Homo sapiens
  misc_feature (61)..(62): /note="This region represents a CpG dinucleotide"
  misc_feature (61)..(61): /note="Nucleotide may be methylated to form 5-methylcytosine"
aacacaagccaagattgtgaaaccacatcaaatcattaagagttcaagaaatcaaagcagcgatgggcagtggtttgaaaattcttggttagatgtttacattgtaacaatttgcatttcag

SEQ ID NO: 23172 - DNA, 122 bp, Homo sapiens
  misc_feature (61)..(62): /note="This region represents a CpG dinucleotide"
  misc_feature (61)..(61): /note="Nucleotide may be methylated to form 5-methylcytosine"
tagatgcagtccccgcctcctggcccagccacatcctttgctccggctcaggagactgagcgaaggacaaaccatccgtagacacggtgctcacaactaggaagaccttcctgccccagagc

SEQ ID NO: 23173 - DNA, 122 bp, Homo sapiens
  misc_feature (61)..(62): /note="This region represents a CpG dinucleotide"
  misc_feature (61)..(61): /note="Nucleotide may be methylated to form 5-methylcytosine"
tcaaatatgcattgaacaagcatgaacaccgagcatacagtccaaacaaataagtcttagcgtatgatctacaccaaaatgtctccaggaaaaccactatgccatttatttccattttttaa

SEQ ID NO: 23174 - DNA, 122 bp, Homo sapiens
  misc_feature (61)..(62): /note="This region represents a CpG dinucleotide"
  misc_feature (61)..(61): /note="Nucleotide may be methylated to form 5-methylcytosine"
cctcccagagaaggctttaaggaagacttcctttaagtcataccagttaacatggctagacggtaatatattgtcatgctatcagaagcagctgcgtaactggaatttgagagcactcaacc

SEQ ID NO: 23175 - DNA, 122 bp, Homo sapiens
  misc_feature (61)..(62): /note="This region represents a CpG dinucleotide"
  misc_feature (61)..(61): /note="Nucleotide may be methylated to form 5-methylcytosine"
gttcacagcagaaagcagaaagctacagccacctgggtggatcaggttaagttcagcaaccgcctaaccctacttgttttagattcagtcctgaggaagggagattagctctattggattag

SEQ ID NO: 23176 - DNA, 122 bp, Homo sapiens
  misc_feature (61)..(62): /note="This region represents a CpG dinucleotide"
  misc_feature (61)..(61): /note="Nucleotide may be methylated to form 5-methylcytosine"
aaggagaggctcgtggattgcaggccgtctacaccaaatgcgctctgcacggccccgtgacggaaacccaggctgctgagtcagacgtgaccggagaagacagccagcgttcagggacccga

SEQ ID NO: 23177 - DNA, 122 bp, Homo sapiens
  misc_feature (61)..(62): /note="This region represents a CpG dinucleotide"
  misc_feature (61)..(61): /note="Nucleotide may be methylated to form 5-methylcytosine"
agatcatttcttgttcatgtgtcatgttgactagggctggctgtgactgtgccccagccccgtgggtggtcctcattctaggatctcagtggaggaagtaggtcctataaggtccttgcagc

SEQ ID NO: 23178 - DNA, 122 bp, Homo sapiens
  misc_feature (61)..(62): /note="This region represents a CpG dinucleotide"
  misc_feature (61)..(61): /note="Nucleotide may be methylated to form 5-methylcytosine"
gccacactggcctttctggtcctgcaacatggcatgcttgcttttgccctggggcctttgcgttggctgtttctgcttctgagatgctctgccccatctcttcacccctaactcttgtcact

SEQ ID NO: 23179 - DNA, 122 bp, Homo sapiens
  misc_feature (61)..(62): /note="This region represents a CpG dinucleotide"
  misc_feature (61)..(61): /note="Nucleotide may be methylated to form 5-methylcytosine"
tggggatagtgtgacctgtccaccaggtcctgctacaaattgacagcagatcccaggcctcgtgttagcccaagctgcttctactgtcacattgcagccttctgcaaggatggggtggtact

SEQ ID NO: 23180 - DNA, 122 bp, Homo sapiens
  misc_feature (61)..(62): /note="This region represents a CpG dinucleotide"
  misc_feature (61)..(61): /note="Nucleotide may be methylated to form 5-methylcytosine"
cagtcccaccattgctgagtcagcagtacctaaggcctgtgactgttaatacctccagtgcgtgggtgacatctctacagtcaattaatgagccagtcttcataagatattacattagccag

SEQ ID NO: 23181 - DNA, 122 bp, Homo sapiens
  misc_feature (61)..(62): /note="This region represents a CpG dinucleotide"
  misc_feature (61)..(61): /note="Nucleotide may be methylated to form 5-methylcytosine"
catttcacataacacttcaagaggatggtctgactgaaagtagctaaaactgcacagtcacgctttctgactcatctcctttgcagttacttctgttttcagtctttctcactcatgggcct

SEQ ID NO: 23182 - DNA, 122 bp, Homo sapiens
  misc_feature (61)..(62): /note="This region represents a CpG dinucleotide"
  misc_feature (61)..(61): /note="Nucleotide may be methylated to form 5-methylcytosine"
aaggtcgggcggcacggcccagaactcaaatatgatccacaaccgaggagcaagcagctgcgggcggcggggagggggcggcgggtgggcaagggggctggggggacagcataggcagctgg

SEQ ID NO: 23183 - DNA, 122 bp, Homo sapiens
  misc_feature (61)..(62): /note="This region represents a CpG dinucleotide"
  misc_feature (61)..(61): /note="Nucleotide may be methylated to form 5-methylcytosine"
gtggaaagccaggcctccagggcctctgacaccaccatgaggacactggcttttagccatcgcagggttttgggcagaggagtcatacatgactaatgttttaaaaggaccactgttggtgc

SEQ ID NO: 23184 - DNA, 122 bp, Homo sapiens
  misc_feature (61)..(62): /note="This region represents a CpG dinucleotide"
  misc_feature (61)..(61): /note="Nucleotide may be methylated to form 5-methylcytosine"
caaagaaatgaaacttatcttaagaactaagaaaaaaaagctgttgatagtaccagcagacggtaaataatatcagctattcagtcgactcagtctgaaattgaatgggaaagtaaaggcag

SEQ ID NO: 23185 - DNA, 122 bp, Homo sapiens
  misc_feature (61)..(62): /note="This region represents a CpG dinucleotide"
  misc_feature (61)..(61): /note="Nucleotide may be methylated to form 5-methylcytosine"
tgccataaagtctttgcccaacatcagtggagtttgtcaaaatgagcgtatctggctccacgtaaggcaaactatctcaacttcatttttcaagcctgtccaaaataatatctattatgcct

SEQ ID NO: 23186 - DNA, 122 bp, Homo sapiens
  misc_feature (61)..(62): /note="This region represents a CpG dinucleotide"
  misc_feature (61)..(61): /note="Nucleotide may be methylated to form 5-methylcytosine"
cgttgtcaaatatgacagaagtaataacttgactgcaattcctgagcctatcaacctcaccgtttgtccacaaacataaccagaatatattttatcttgatttccgacttgagggaaaataa

SEQ ID NO: 23187 - DNA, 122 bp, Homo sapiens
  misc_feature (61)..(62): /note="This region represents a CpG dinucleotide"
  misc_feature (61)..(61): /note="Nucleotide may be methylated to form 5-methylcytosine"
atgcaagagttcaaaatgctggcctgaagaagtctatgaaaatgtcaagtcatgcctttgcgaggagataactacttggcatatacctttccctgaatgataaagaaggaaagaaaaaatgt

SEQ ID NO: 23188 - DNA, 122 bp, Homo sapiens
  misc_feature (61)..(62): /note="This region represents a CpG dinucleotide"
  misc_feature (61)..(61): /note="Nucleotide may be methylated to form 5-methylcytosine"
ttaaacactttccaacatccaatgagcacttatacaaagattgctttttatttcatttaccgccttctcagctgtttatgagtcaaactgtttcctggtactgttgctgtaggtgtatattg

SEQ ID NO: 23189 - DNA, 122 bp, Homo sapiens
  misc_feature (61)..(62): /note="This region represents a CpG dinucleotide"
  misc_feature (61)..(61): /note="Nucleotide may be methylated to form 5-methylcytosine"
gaagggaagtcgctttctgtttttgttgccggaaagggcaaagaatcaaaacaccactttcgcaatgaatgatcttacaaaattgcaataactgtgacaagacctgaaagacaaaacgcatt

SEQ ID NO: 23190 - DNA, 122 bp, Homo sapiens
  misc_feature (61)..(62): /note="This region represents a CpG dinucleotide"
  misc_feature (61)..(61): /note="Nucleotide may be methylated to form 5-methylcytosine"
taggtacagaaaattatattgctttcagttttctttcccctttcctctccatcccccccacggaacttgtctcaggttttcagagtcggactgctagattagtacaataaaagtgttgtgaa

SEQ ID NO: 23191 - DNA, 122 bp, Homo sapiens
  misc_feature (61)..(62): /note="This region represents a CpG dinucleotide"
  misc_feature (61)..(61): /note="Nucleotide may be methylated to form 5-methylcytosine"
agggcatttttaggttcacaacaaaattgagcagaaagtacagttttcatattacccctgcgcccacccacctccagcaagcagcaatctgttcgctttcaagttttatttatttatttatt

SEQ ID NO: 23192 - DNA, 122 bp, Homo sapiens
  misc_feature (61)..(62): /note="This region represents a CpG dinucleotide"
  misc_feature (61)..(61): /note="Nucleotide may be methylated to form 5-methylcytosine"
gcgtgaccctggggaacggttaggtggctgtggcaaggagatgccaggttggaggcgtggcgagggtgagatggtgcctgctgcctcgtgccagccctggctcagctgtgttgagccccctc

SEQ ID NO: 23193 - DNA, 122 bp, Homo sapiens
  misc_feature (61)..(62): /note="This region represents a CpG dinucleotide"
  misc_feature (61)..(61): /note="Nucleotide may be methylated to form 5-methylcytosine"
tagagttacttaagcgttcgtttactaatagccatttgtattgctcctgttaccagaaagcggtcgtgatccagtccccaagagagagttcttggaccttgctcaagaaaagaattcgggcg

SEQ ID NO: 23194 - DNA, 122 bp, Homo sapiens
  misc_feature (61)..(62): /note="This region represents a CpG dinucleotide"
  misc_feature (61)..(61): /note="Nucleotide may be methylated to form 5-methylcytosine"
ccgcgaccgggagaaaacgcagagtcgtcaccggagagaagtcgactccctagcagcagtcgacgccagagggccgcccacctgttcgcccgtccccctgccctgttcacaatgcagcctgc

SEQ ID NO: 23195 - DNA, 122 bp, Homo sapiens
  misc_feature (61)..(62): /note="This region represents a CpG dinucleotide"
  misc_feature (61)..(61): /note="Nucleotide may be methylated to form 5-methylcytosine"
tgcttgaggcggtgctacaaatgaagtccttctccaaatgcattgagccccaagaaaaatcgctgattctgaggaaccttccaactttaacaatttcaggacgtccctaagctgagctagga

SEQ ID NO: 23196 - DNA, 122 bp, Homo sapiens
  misc_feature (61)..(62): /note="This region represents a CpG dinucleotide"
  misc_feature (61)..(61): /note="Nucleotide may be methylated to form 5-methylcytosine"
cgtctcaaaaaaaaaaaagtcatctagtcagtctagtcatgcttaaatcccccagcctgacgcagatactgagccgaggagccaccctaagggaaaatgggttttttcctgctcgtgtttgc

SEQ ID NO: 23197 - DNA, 122 bp, Homo sapiens
  misc_feature (61)..(62): /note="This region represents a CpG dinucleotide"
  misc_feature (61)..(61): /note="Nucleotide may be methylated to form 5-methylcytosine"
gtcaagcaaaagaggacatcctgtataattctgtttatataaactttgaaaaaggcaaaacgaatctgagctgtcagcattcaggatggtggttatccttgaggaggccagaaggaagcatg

SEQ ID NO: 23198 - DNA, 122 bp, Homo sapiens
  misc_feature (61)..(62): /note="This region represents a CpG dinucleotide"
  misc_feature (61)..(61): /note="Nucleotide may be methylated to form 5-methylcytosine"
gttgcacgtgtcacttaccacccccatacggccctcttcctgactgtcgcctcccttcctcgcttacagaccagttacttaatctgccacatgacgagatggtatctgggatctctaacggc

SEQ ID NO: 23199 - DNA, 122 bp, Homo sapiens
  misc_feature (61)..(62): /note="This region represents a CpG dinucleotide"
  misc_feature (61)..(61): /note="Nucleotide may be methylated to form 5-methylcytosine"
tgggagagaagacccatctccacagctcctctcaaaacaaacccagccaaattaaacaagcgtacagaagagcaataggaaagatgttctaaagggctacactctccagaagagctaaatta

SEQ ID NO: 23200 - DNA, 122 bp, Homo sapiens
  misc_feature (61)..(62): /note="This region represents a CpG dinucleotide"
  misc_feature (61)..(61): /note="Nucleotide may be methylated to form 5-methylcytosine"
acaataaacacgagccaagaagcctggctaatttttaaattttctgtagagacagcctctcgttatgtttctgaggctggtctcaaacacctgacctcaggcaatccttccacctcagcctc

SEQ ID NO: 23201 - DNA, 122 bp, Homo sapiens
  misc_feature (61)..(62): /note="This region represents a CpG dinucleotide"
  misc_feature (61)..(61): /note="Nucleotide may be methylated to form 5-methylcytosine"
tttccccatatctgggatgtcaggagagaaagggaagctgtttcatcaaatatatctttacggtgaatacaagatccccaattgcaagcctgaatgtagcctttactcatgtcattgcgtca

SEQ ID NO: 23202 - DNA, 122 bp, Homo sapiens
  misc_feature (61)..(62): /note="This region represents a CpG dinucleotide"
  misc_feature (61)..(61): /note="Nucleotide may be methylated to form 5-methylcytosine"
cagtggaggctttgagatgcaggtgtggctgttggggttacgagatgtgcaggtatgtcccgcttttacgtcccagctctgaagcatagttcctatggaaaactccagccatgcttcttttc

SEQ ID NO: 23203 - DNA, 122 bp, Homo sapiens
  misc_feature (61)..(62): /note="This region represents a CpG dinucleotide"
  misc_feature (61)..(61): /note="Nucleotide may be methylated to form 5-methylcytosine"
ctaggaagaagtgatccttgagacaaaataactctaattagatatcctctttgccagattcgcaggattgccacaccactgagggctggggactgtgttacactggaaggaatgtccactgg

SEQ ID NO: 23204 - DNA, 122 bp, Homo sapiens
  misc_feature (61)..(62): /note="This region represents a CpG dinucleotide"
  misc_feature (61)..(61): /note="Nucleotide may be methylated to form 5-methylcytosine"
caatatattgcatttgaatgaagacaacagcctcctacttggtcttctagcagtggtttacgtggtttttggtagtctctgctgaggtttatcttgccagtctcccctctagactctcccca

SEQ ID NO: 23205 - DNA, 122 bp, Homo sapiens
  misc_feature (61)..(62): /note="This region represents a CpG dinucleotide"
  misc_feature (61)..(61): /note="Nucleotide may be methylated to form 5-methylcytosine"
tctgcgaaaagagcatttgccaggcagcagatgtactggcttcctcaagactgaagctttcgttggttttgaggactttgatggaagccacctcattttacccagatggtgtcttttgggga

SEQ ID NO: 23206 - DNA, 122 bp, Homo sapiens
  misc_feature (61)..(62): /note="This region represents a CpG dinucleotide"
  misc_feature (61)..(61): /note="Nucleotide may be methylated to form 5-methylcytosine"
gggcaggagtgagctgctcccgtgctgggaagagcttggctcaggtccatgggaacatggcggcattgaggccatctttctggaagaccacttgtgtgagtcacccaccttcttaaaactct

SEQ ID NO: 23207 - DNA, 122 bp, Homo sapiens
  misc_feature (61)..(62): /note="This region represents a CpG dinucleotide"
  misc_feature (61)..(61): /note="Nucleotide may be methylated to form 5-methylcytosine"
ctttctctctccttcttaaaagattttggagccgggaagataagatatgcaatcctctatcgggaatcctgtgatattaaagatcaaacgtagcatcaatggaagaccaaatgcagggggaa

SEQ ID NO: 23208 - DNA, 122 bp, Homo sapiens
  misc_feature (61)..(62): /note="This region represents a CpG dinucleotide"
  misc_feature (61)..(61): /note="Nucleotide may be methylated to form 5-methylcytosine"
aaaggtagaaaaggggtcggatctgaaaaggggagaggcattcagccgctgcttttgatgcgctatctatattagaccgatgcgccgttcttaatcaggcctagtccgatttcctttcctct

SEQ ID NO: 23209 - DNA, 122 bp, Homo sapiens
  misc_feature (61)..(62): /note="This region represents a CpG dinucleotide"
  misc_feature (61)..(61): /note="Nucleotide may be methylated to form 5-methylcytosine"
gaagaagccattcacatacacatttattcacctggggaacaggtatccgagcatttattacgtgccaggagataacaacagtacacgaaaggaaaatctagctgggcctcctctcctgaggg

SEQ ID NO: 23210 - DNA, 122 bp, Homo sapiens
  misc_feature (61)..(62): /note="This region represents a CpG dinucleotide"
  misc_feature (61)..(61): /note="Nucleotide may be methylated to form 5-methylcytosine"
cgcttcattttaaacatgttggccaacacaaaatgattcattgatgtcagttacaagtagcgcagaataatagcatcactcctagacgttgtgtcagggctgtgatatgaagcattctaaaa

SEQ ID NO: 23211 - DNA, 122 bp, Homo sapiens
  misc_feature (61)..(62): /note="This region represents a CpG dinucleotide"
  misc_feature (61)..(61): /note="Nucleotide may be methylated to form 5-methylcytosine"
tctttccaagtcaaaatccgttccttgctttggcttttagatctgaacttttcaagacttcgcagttttgtagaactgcttggtaaggctcgatcaggcttcctgtcacggtgacactgttt

SEQ ID NO: 23212 - DNA, 122 bp, Homo sapiens
  misc_feature (61)..(62): /note="This region represents a CpG dinucleotide"
  misc_feature (61)..(61): /note="Nucleotide may be methylated to form 5-methylcytosine"
ccaaattaagcaaggatagaagatgcttcctattaaaattgcaaaagctggctcaacactcgaccataggacttgtacatgattttccttcctctaacacatataatgagtcaatctacaag

SEQ ID NO: 23213 - DNA, 122 bp, Homo sapiens
  misc_feature (61)..(62): /note="This region represents a CpG dinucleotide"
  misc_feature (61)..(61): /note="Nucleotide may be methylated to form 5-methylcytosine"
agaaggagaacctgtgtgtgtgtgtgtgtgtgtgtgttgaaagaaagagatgtgttttaacgaattggttcacacagttgttggagtggcaagtccaaattttgaaaggcaggcaggctgga

SEQ ID NO: 23214 - DNA, 122 bp, Homo sapiens
  misc_feature (61)..(62): /note="This region represents a CpG dinucleotide"
  misc_feature (61)..(61): /note="Nucleotide may be methylated to form 5-methylcytosine"
accaccggcatctcttacctctgaataaggcttcctgcaattctcactcaacagagaagccggtttgatctatttaaatccttccatgcttaaaaccagtctaccaagtcccattgtttagg

SEQ ID NO: 23215 - DNA, 122 bp, Homo sapiens
  misc_feature (61)..(62): /note="This region represents a CpG dinucleotide"
  misc_feature (61)..(61): /note="Nucleotide may be methylated to form 5-methylcytosine"
aaggtgcatttaagaatccatgtgactttagaatggaactgccggccctggcaactgtcacgtgtgctagaaggttcgatgcctctggaatgcatgtgatactcatctccattttgtttcct

SEQ ID NO: 23216 - DNA, 122 bp, Homo sapiens
  misc_feature (61)..(62): /note="This region represents a CpG dinucleotide"
  misc_feature (61)..(61): /note="Nucleotide may be methylated to form 5-methylcytosine"
ggccttactcctcactgtgacataatcccagaacgcatctctgctccttggtcagtgaagcgatgagggtggacacaaggactagacaagagcagacagtgagctggcacctgacccaccct

SEQ ID NO: 23217 - DNA, 122 bp, Homo sapiens
  misc_feature (61)..(62): /note="This region represents a CpG dinucleotide"
  misc_feature (61)..(61): /note="Nucleotide may be methylated to form 5-methylcytosine"
ctgtcatcatagattagttttgcctgttcttcaacttcatatacatttgaccatatggcacgttctcttttggtcctggcttcttttagtcaacatgtctgcgggattcatctgtgttactg

SEQ ID NO: 23218 - DNA, 122 bp, Homo sapiens
  misc_feature (61)..(62): /note="This region represents a CpG dinucleotide"
  misc_feature (61)..(61): /note="Nucleotide may be methylated to form 5-methylcytosine"
ggggaaattcttccttcccgtgctggtgaaaacatgatgatgacacactgaaatgcgttgcgttttgtcagcaaattctgtcagaagcacggcaaacgctggagaaggtttgaggaagcgca

SEQ ID NO: 23219 - DNA, 122 bp, Homo sapiens
  misc_feature (61)..(62): /note="This region represents a CpG dinucleotide"
  misc_feature (61)..(61): /note="Nucleotide may be methylated to form 5-methylcytosine"
tttttaaagactggccaagtgacttgcataatttaagatcctttctagcactgatcagcccgctctggccaagcagtttgctgattaattattaatcagactgagtttaggatgagtaatca

SEQ ID NO: 23220 - DNA, 122 bp, Homo sapiens
  misc_feature (61)..(62): /note="This region represents a CpG dinucleotide"
  misc_feature (61)..(61): /note="Nucleotide may be methylated to form 5-methylcytosine"
tattgattggctgaagccccagaaatacctgccatgtgctgggctgtgacagtcacttggcgttcctgggacatgttcatgtgaattctcaccggtggcttcacccacccccagtcctgtgg

SEQ ID NO: 23221 - DNA, 122 bp, Homo sapiens
  misc_feature (61)..(62): /note="This region represents a CpG dinucleotide"
  misc_feature (61)..(61): /note="Nucleotide may be methylated to form 5-methylcytosine"
tggggaagcagacgggtctgttttctagcccgctccctctgtagatgtctcttacataagcgatgtcctcagaggttgagctggacatacttatgtgcaaggccgcccatgcctgattgcat

SEQ ID NO: 23222 - DNA, 122 bp, Homo sapiens
  misc_feature (61)..(62): /note="This region represents a CpG dinucleotide"
  misc_feature (61)..(61): /note="Nucleotide may be methylated to form 5-methylcytosine"
gcctgaattaatgaatgctttcaaagttttgcaacagttgaatcaccagttcccatcaagcgtgactgaagcagaattagctcattctgaatgctgaagccatctacacacacacacacaca

SEQ ID NO: 23223 - DNA, 122 bp, Homo sapiens
  misc_feature (61)..(62): /note="This region represents a CpG dinucleotide"
  misc_feature (61)..(61): /note="Nucleotide may be methylated to form 5-methylcytosine"
actagaggtgtgtggcttgtgggattctgccaccctgtgtgcagcccttgagacgtggctcgtgcagcaaggccaagtccctgattgttctctcgttttaggctttgccattggggtgcagc

SEQ ID NO: 23224 - DNA, 122 bp, Homo sapiens
  misc_feature (61)..(62): /note="This region represents a CpG dinucleotide"
  misc_feature (61)..(61): /note="Nucleotide may be methylated to form 5-methylcytosine"
gaatggtggacccaatcccccggtgcaagcactcccaggactcatatggtccttgtcccacgaaatttcagagggctaattccaccaggctccgaagtcctgtgctttttctcatataaaaa

SEQ ID NO: 23225 - DNA, 122 bp, Homo sapiens
  misc_feature (61)..(62): /note="This region represents a CpG dinucleotide"
  misc_feature (61)..(61): /note="Nucleotide may be methylated to form 5-methylcytosine"
actctgttaaccccttttctcatctcaacacagtgtaatttagccttctgataatttactcgttcacccacatcatctgagcacccactgtgcaacaggcagcgggccagacactagggaca

SEQ ID NO: 23226 - DNA, 122 bp, Homo sapiens
  misc_feature (61)..(62): /note="This region represents a CpG dinucleotide"
  misc_feature (61)..(61): /note="Nucleotide may be methylated to form 5-methylcytosine"
tgctccagcctggaagtgaagtctcatccgctcacaggtcgttagctacagctcctcacacgttcctgggaaacacagggaagcagaaagtgtggtcctaccatgaacctagaggtctggaa

SEQ ID NO: 23227 - DNA, 122 bp, Homo sapiens
  misc_feature (61)..(62): /note="This region represents a CpG dinucleotide"
  misc_feature (61)..(61): /note="Nucleotide may be methylated to form 5-methylcytosine"
tggtcaggataacctagttttcttactgtcaggcctgagtctccgctggcttaatgatgacgtttaaatttccttttctgtcctttcagttgcagggtataagtgtttatctcagaatgtcc

SEQ ID NO: 23228 - DNA, 122 bp, Homo sapiens
  misc_feature (61)..(62): /note="This region represents a CpG dinucleotide"
  misc_feature (61)..(61): /note="Nucleotide may be methylated to form 5-methylcytosine"
tgctactattctaggcatttccctgaaatgttcaactttccattgaccaagaaagcagctcgcccaagtgtgtgggaagcacttgggtgggacacttttctgccccatttccagaaggatta

SEQ ID NO: 23229 - DNA, 122 bp, Homo sapiens
  misc_feature (61)..(62): /note="This region represents a CpG dinucleotide"
  misc_feature (61)..(61): /note="Nucleotide may be methylated to form 5-methylcytosine"
ttcatgtgctttcatgtatagaccaacagcaaagcctttactgccaagacttcctgtgtgcggcgccgctaccgtgagttcgtgtggctgagaaagcagctacagagaaatgctggtttggt

SEQ ID NO: 23230 - DNA, 122 bp, Homo sapiens
  misc_feature (61)..(62): /note="This region represents a CpG dinucleotide"
  misc_feature (61)..(61): /note="Nucleotide may be methylated to form 5-methylcytosine"
atggctctcagttttaggagataaggttcagttaagtgctttggggacaggaaactggttcgtaaccttcaaagttaaaacctgtgatacttatctgatgctcctctgagttagccaatcac

SEQ ID NO: 23231 - DNA, 122 bp, Homo sapiens
  misc_feature (61)..(62): /note="This region represents a CpG dinucleotide"
  misc_feature (61)..(61): /note="Nucleotide may be methylated to form 5-methylcytosine"
ctgtcagggcgttgaacatgatttatgacgtctgcctattaggggatcgattgtgaatatcgccactatcatctatcaatattctcaagccgggggtatttctcgctccacggtagttattt

SEQ ID NO: 23232 - DNA, 122 bp, Homo sapiens
  misc_feature (61)..(62): /note="This region represents a CpG dinucleotide"
  misc_feature (61)..(61): /note="Nucleotide may be methylated to form 5-methylcytosine"
atcaagacaatgggagaatgactccaaaggcacttcagagatctttgaggctgccactctcgtcacaggcccggagtgctagggccttgagggaagaacgtttcaaaggagatcccagggca

SEQ ID NO: 23233 - DNA, 122 bp, Homo sapiens
  misc_feature (61)..(62): /note="This region represents a CpG dinucleotide"
  misc_feature (61)..(61): /note="Nucleotide may be methylated to form 5-methylcytosine"
catcagcttgtcaactggtcatgtgctttaagatcagccatctcggacattgaggtgaggcggagagagggaagcaggtttgtgagagctctgaggcagagtggtcaatgattaagagctca

SEQ ID NO: 23234 - DNA, 122 bp, Homo sapiens
  misc_feature (61)..(62): /note="This region represents a CpG dinucleotide"
  misc_feature (61)..(61): /note="Nucleotide may be methylated to form 5-methylcytosine"
caatttgccacgtacgtctggacagtttcactttcttgtcatgaatacatatgtgctacacgaaaagggaaaagtggcaggtaatttgtctttatgcatgtttatttatcctttgctaagag

SEQ ID NO: 23235 - DNA, 122 bp, Homo sapiens
  misc_feature (61)..(62): /note="This region represents a CpG dinucleotide"
  misc_feature (61)..(61): /note="Nucleotide may be methylated to form 5-methylcytosine"
gcatgcctaacgtcacgcgaagtcttctaacccatacgcgctgatgaatcctggcaactccgttagggagacacgacttatcaaacccttttcatggcccagctgaaatgacacactgacgt

SEQ ID NO: 23236 - DNA, 122 bp, Homo sapiens
  misc_feature (61)..(62): /note="This region represents a CpG dinucleotide"
  misc_feature (61)..(61): /note="Nucleotide may be methylated to form 5-methylcytosine"
ctgttgggtagaggaaaggtctgaggtgtctggcacatgacattcccctgtgtgttgcatcgttcgaggactcctcacagctgtggatttgcacagttgtgaactttgactttgttattttt

SEQ ID NO: 23237 - DNA, 122 bp, Homo sapiens
  misc_feature (61)..(62): /note="This region represents a CpG dinucleotide"
  misc_feature (61)..(61): /note="Nucleotide may be methylated to form 5-methylcytosine"
gttttcttgctcccaaggaactgccagcaatttgcagattaactttagccaatagctctacgagacagagaaacttcacacatttccctgggctgggctatgttctcagttctagtataagc

SEQ ID NO: 23238 - DNA, 122 bp, Homo sapiens
  misc_feature (61)..(62): /note="This region represents a CpG dinucleotide"
  misc_feature (61)..(61): /note="Nucleotide may be methylated to form 5-methylcytosine"
tataattgttctggtgagtgatgagcctgttgtgaccttctcccacttggctgctgaccacgtgagagggcagggctggtccagagtcctcacccgacctgagcgtccaactgcaactgtat

SEQ ID NO: 23239 - DNA, 122 bp, Homo sapiens
  misc_feature (61)..(62): /note="This region represents a CpG dinucleotide"
  misc_feature (61)..(61): /note="Nucleotide may be methylated to form 5-methylcytosine"
ttatatcaggctaattctagtagaacttcgattttgcatacattttccagggctattatgcgtttttagcttttctatatcctcaaatgacatgaaattgccttaatgaggctaattaaaca

SEQ ID NO: 23240 - DNA, 122 bp, Homo sapiens
  misc_feature (61)..(62): /note="This region represents a CpG dinucleotide"
  misc_feature (61)..(61): /note="Nucleotide may be methylated to form 5-methylcytosine"
ccgccgcacccaccccgttggcctcaccctggctcgggcccctttatcatcctgcagctacgctccgaccaggaggcacagccagtccccacagccggctctaccgctctgctcgcaggttt

SEQ ID NO: 23241 - DNA, 122 bp, Homo sapiens
  misc_feature (61)..(62): /note="This region represents a CpG dinucleotide"
  misc_feature (61)..(61): /note="Nucleotide may be methylated to form 5-methylcytosine"
ggaagaggttacctgagacttgacttaacctccttgggagggaacatgctttcactgttgcgaattgttaagtcaggtccagagtgatccagtcacttatcatgagtcatacagtaaccaga

SEQ ID NO: 23242 - DNA, 122 bp, Homo sapiens
  misc_feature (61)..(62): /note="This region represents a CpG dinucleotide"
  misc_feature (61)..(61): /note="Nucleotide may be methylated to form 5-methylcytosine"
cttcagtgggctgcctcctgaggctgccttttgctgggtaataccttaggatgtgagagccgcttgcctttaaatatggaaccagctgctacgtgctcttgaccacggcaaagctggcagga

SEQ ID NO: 23243 - DNA, 122 bp, Homo sapiens
  misc_feature (61)..(62): /note="This region represents a CpG dinucleotide"
  misc_feature (61)..(61): /note="Nucleotide may be methylated to form 5-methylcytosine"
catgaacagctccaggtccaatactggctcctttgcttattagcagtgtgaccgtgggcacgttacttacacccttttattagcggtaaaatgggagcgttactcaccttgttagaattatg

SEQ ID NO: 23244 - DNA, 122 bp, Homo sapiens
  misc_feature (61)..(62): /note="This region represents a CpG dinucleotide"
  misc_feature (61)..(61): /note="Nucleotide may be methylated to form 5-methylcytosine"
gagccccagcaccatatttggctctgcaggcaagattgatagattcttgctgtcaccagccgcactctgatggcagctttccaggcctcctcctcacccctcccccagccccactccacctt

SEQ ID NO: 23245 - DNA, 122 bp, Homo sapiens
  misc_feature (61)..(62): /note="This region represents a CpG dinucleotide"
  misc_feature (61)..(61): /note="Nucleotide may be methylated to form 5-methylcytosine"
tttcaaatgagggtgtggattttggggaagaacaccacagaggtgattgccctatcatcacgtcattgcagggcgtacatgatattgatatgtcttattcatggtgatgtcagccagacctc

SEQ ID NO: 23246 - DNA, 122 bp, Homo sapiens
  misc_feature (61)..(62): /note="This region represents a CpG dinucleotide"
  misc_feature (61)..(61): /note="Nucleotide may be methylated to form 5-methylcytosine"
tctttgaaaacagggaatggaggagagtcaagcaggaagagtgattgatcctgtcttgagcgtgttctgcacttgggaaggtaagcttgtcatcaacattgtcagtgtgagatttaacagga

SEQ ID NO: 23247 - DNA, 122 bp, Homo sapiens
  misc_feature (61)..(62): /note="This region represents a CpG dinucleotide"
  misc_feature (61)..(61): /note="Nucleotide may be methylated to form 5-methylcytosine"
acatgtctaattcagggcccttcctgtgtcttagcagtgacttaactaaaataaacatgtcgaatgtaaatctgggaagtaccactgggctttcaattgtcatattgcacagtagccattta

SEQ ID NO: 23248 - DNA, 122 bp, Homo sapiens
  misc_feature (61)..(62): /note="This region represents a CpG dinucleotide"
  misc_feature (61)..(61): /note="Nucleotide may be methylated to form 5-methylcytosine"
tcaccgttcccatgtgtggctgataagggccaggagattccacagttcaggtagttcccccgcctccctggcattttgtggtcaccattaatcatttcctctgtgtatttaagagctctttt

SEQ ID NO: 23249 - DNA, 122 bp, Homo sapiens
  misc_feature (61)..(62): /note="This region represents a CpG dinucleotide"
  misc_feature (61)..(61): /note="Nucleotide may be methylated to form 5-methylcytosine"
cttccagccaatcagcaacaaaagacccaagaagccattaacctcaagtccctggtttagcgggttagggactgctccagggtcctgtctgcgcagttcaacttaaagttacccctccctca

SEQ ID NO: 23250 - DNA, 122 bp, Homo sapiens
  misc_feature (61)..(62): /note="This region represents a CpG dinucleotide"
  misc_feature (61)..(61): /note="Nucleotide may be methylated to form 5-methylcytosine"
aaatccaggagtagaaattgcaggattgtagggtaagtgtgtttatagtttttaaagtaacggcctattttgcattcccactggcaatgcatgagaattccagggctccaaatccttgttga

SEQ ID NO: 23251 - DNA, 122 bp, Homo sapiens
  misc_feature (61)..(62): /note="This region represents a CpG dinucleotide"
  misc_feature (61)..(61): /note="Nucleotide may be methylated to form 5-methylcytosine"
taatgtttaatgtagccatgcctagactgagattctttttcttttgaaataagtagcctgcggaattaatgcatatttttgttggcactgcatcaaaattgacatcaccggaaataatgtat

SEQ ID NO: 23252 - DNA, 122 bp, Homo sapiens
  misc_feature (61)..(62): /note="This region represents a CpG dinucleotide"
  misc_feature (61)..(61): /note="Nucleotide may be methylated to form 5-methylcytosine"
ccagccagccagtgggaagctccaggagggctggaggccagtagtgtggggacagatctgcgtgatcttccccagcagacgtgcccctgctcctggagggttctttctgtggccacgtgggg

SEQ ID NO: 23253 - DNA, 122 bp, Homo sapiens
  misc_feature (61)..(62): /note="This region represents a CpG dinucleotide"
  misc_feature (61)..(61): /note="Nucleotide may be methylated to form 5-methylcytosine"
aactacttcttacttctctttcctgtatacaagctgtagggcactgagccaaaggtgaaccgtccagagaaagaagaccgtatctgctaacttctcctggtccacgtgccagcaggagagaa

SEQ ID NO: 23254 - DNA, 122 bp, Homo sapiens
  misc_feature (61)..(62): /note="This region represents a CpG dinucleotide"
  misc_feature (61)..(61): /note="Nucleotide may be methylated to form 5-methylcytosine"
cagcctgctccctgggatcatggtgcagtggggccctctctgctctacctcccggtagagcgccaggcattaagagcacccacttgcctggaccagcagcctgagctgccccacccttcttg

SEQ ID NO: 23255 - DNA, 122 bp, Homo sapiens
  misc_feature (61)..(62): /note="This region represents a CpG dinucleotide"
  misc_feature (61)..(61): /note="Nucleotide may be methylated to form 5-methylcytosine"
gtgaaggtgcacgaggaagatgaagctgggatcgagcagggcagggcctgggagaggaagcgcgggactcctgcctggcgtccacgagctgcccatgggcatccctgccccctgggggacca

SEQ ID NO: 23256 - DNA, 122 bp, Homo sapiens
  misc_feature (61)..(62): /note="This region represents a CpG dinucleotide"
  misc_feature (61)..(61): /note="Nucleotide may be methylated to form 5-methylcytosine"
tgcacaatcccatgacattgtggttttctgccagatgcttggagacaatgtactccagtgcgcacacctgcttctttacactctgacccatttaacaagctatgtcagaagcctgctttttc

SEQ ID NO: 23257 - DNA, 122 bp, Homo sapiens
  misc_feature (61)..(62): /note="This region represents a CpG dinucleotide"
  misc_feature (61)..(61): /note="Nucleotide may be methylated to form 5-methylcytosine"
ttgtttaggtaactactccagacccccagcgtatagtggggtgcccagtgcaagctacagcggcccagggcccggtatgggtatcagtgccaacaaccagatgcatggacaagggccaagcc

SEQ ID NO: 23258 - DNA, 122 bp, Homo sapiens
  misc_feature (61)..(62): /note="This region represents a CpG dinucleotide"
  misc_feature (61)..(61): /note="Nucleotide may be methylated to form 5-methylcytosine"
agtcaagggcaaaagcttgtgactcagcaacactaccagttaaagagctatcctgtattacgcacttactgtatgccaggtgccacactcaggccttggctttcattactttaattaaccct

SEQ ID NO: 23259 - DNA, 122 bp, Homo sapiens
  misc_feature (61)..(62): /note="This region represents a CpG dinucleotide"
  misc_feature (61)..(61): /note="Nucleotide may be methylated to form 5-methylcytosine"
tgacaccaaagacttgagttaatgacaacgctaacctgaactgtgaattctcctgcatttcgcctgagtgtgtcatcactgtaaagtgttgcaatgtgagtctgggcaattaacgcccagag

SEQ ID NO: 23260 - DNA, 122 bp, Homo sapiens
  misc_feature (61)..(62): /note="This region represents a CpG dinucleotide"
  misc_feature (61)..(61): /note="Nucleotide may be methylated to form 5-methylcytosine"
ttaactgccacattacctgactcatctattaaagaatctacagaaagataaacatgacagcgctgcgttttaaagtacgcttatacctactaggttaagtaaattacacactggaagtacaa

SEQ ID NO: 23261 - DNA, 122 bp, Homo sapiens
  misc_feature (61)..(62): /note="This region represents a CpG dinucleotide"
  misc_feature (61)..(61): /note="Nucleotide may be methylated to form 5-methylcytosine"
aggattcctggggttaaaaattatctaaaaataaagaaagacacaggccagctcgggcaacggcacaggcctggcccagttctggaggactgtttactgctgagtctgacatgttattcctc

SEQ ID NO: 23262 - DNA, 122 bp, Homo sapiens
  misc_feature (61)..(62): /note="This region represents a CpG dinucleotide"
  misc_feature (61)..(61): /note="Nucleotide may be methylated to form 5-methylcytosine"
tggttgtcatttccttcctctgcttcctttagcacaggaaagccaccaaggagccgcctacgccagcacatccatcacccagactcccagggcactgttcatctgagaggccagacacagcg

SEQ ID NO: 23263 - DNA, 122 bp, Homo sapiens
  misc_feature (61)..(62): /note="This region represents a CpG dinucleotide"
  misc_feature (61)..(61): /note="Nucleotide may be methylated to form 5-methylcytosine"
accttcgcagagccactaatatcttcctgaagaccctattcagcggatttgccatccccacgcgctggtgacaagccacatctcacttcagcgtttgaagccaacccagatcaccttcatac

SEQ ID NO: 23264 - DNA, 122 bp, Homo sapiens
  misc_feature (61)..(62): /note="This region represents a CpG dinucleotide"
  misc_feature (61)..(61): /note="Nucleotide may be methylated to form 5-methylcytosine"
catgcaataacactctactttttaatccttacagcgactcagagataacaatagacattacgatcctcattctactcacaaagaaaacaaggcttggagaaggttagggattggtctaaaga

SEQ ID NO: 23265 - DNA, 122 bp, Homo sapiens
  misc_feature (61)..(62): /note="This region represents a CpG dinucleotide"
  misc_feature (61)..(61): /note="Nucleotide may be methylated to form 5-methylcytosine"
cagagtcagggactcattagttcaactatgtgccatgctaatagtctaccagaatctcctcgcttctcaccgagaaagaaccatcattgaagatttgtgtagtagagaaacctccaaccatc

SEQ ID NO: 23266 - DNA, 122 bp, Homo sapiens
  misc_feature (61)..(62): /note="This region represents a CpG dinucleotide"
  misc_feature (61)..(61): /note="Nucleotide may be methylated to form 5-methylcytosine"
cagtgagaactgactcagaggtgacttccaaggccaacctggggtgatctggctgagtctcggaccagtctcaagtgctgtggaaggtcatgagagtggcaaggctgaacctcaagaccagt

SEQ ID NO: 23267 - DNA, 122 bp, Homo sapiens
  misc_feature (61)..(62): /note="This region represents a CpG dinucleotide"
  misc_feature (61)..(61): /note="Nucleotide may be methylated to form 5-methylcytosine"
aaattacaagcaattacttacgtgaagcatcgagcagagctcagcacatagtaggcactgcgttaattacagccactggcatcaccactttaccgcccagatcccccagcagcaacccttcc

SEQ ID NO: 23268 - DNA, 122 bp, Homo sapiens
  misc_feature (61)..(62): /note="This region represents a CpG dinucleotide"
  misc_feature (61)..(61): /note="Nucleotide may be methylated to form 5-methylcytosine"
cttttactggtacttcgtgtctttggtcttaatcaaaatacaggaagtccctgctttgcacgacagcacagaccatagaaatgactgtgcaagatgaaaccatgtaaagtgatctgaataat

SEQ ID NO: 23269 - DNA, 122 bp, Homo sapiens
  misc_feature (61)..(62): /note="This region represents a CpG dinucleotide"
  misc_feature (61)..(61): /note="Nucleotide may be methylated to form 5-methylcytosine"
acacaggatataagacagccaaaggcaatattccttactcacattactcatgcaaagtctcgtgatgagcagcggcggaagtcatgggataaacaaaaacaaatccatgaccctcgaaacca

SEQ ID NO: 23270 - DNA, 122 bp, Homo sapiens
  misc_feature (61)..(62): /note="This region represents a CpG dinucleotide"
  misc_feature (61)..(61): /note="Nucleotide may be methylated to form 5-methylcytosine"
caactgacttaaagaaataaaccacaagtagttaagaaacacaaaagttcaaattgcatccggtgtagctctgtgagaaaatttctgcagcagaaggaagtctgttattcttgacctgaact

SEQ ID NO: 23271 - DNA, 122 bp, Homo sapiens
  misc_feature (61)..(62): /note="This region represents a CpG dinucleotide"
  misc_feature (61)..(61): /note="Nucleotide may be methylated to form 5-methylcytosine"
agaaaattagtaataagagaaacattaatcatttggcagtggtttttgttggaatcactacgccagcaatttttcaccagtagacaaggatgagtacattataaactgggtgtcattgtgcc

SEQ ID NO: 23272 - DNA, 122 bp, Homo sapiens
  misc_feature (61)..(62): /note="This region represents a CpG dinucleotide"
  misc_feature (61)..(61): /note="Nucleotide may be methylated to form 5-methylcytosine"
gtgtttgttaggtgcaagtaactgtgctagacactgtggggaatatcaagatgagtatgacgtgagtctcaactgtggaataatttactttaatgtggaggtggtagttaataagaatacaa

SEQ ID NO: 23273 - DNA, 122 bp, Homo sapiens
  misc_feature (61)..(62): /note="This region represents a CpG dinucleotide"
  misc_feature (61)..(61): /note="Nucleotide may be methylated to form 5-methylcytosine"
acccaattcaggacacaaggggcccatctgaggttctccctcaccatctcctcagccacacgccctgactccggacttctgctgccgcctcggcgccgccaaggccctagtgttgacgcgtt

SEQ ID NO: 23274 - DNA, 122 bp, Homo sapiens
  misc_feature (61)..(62): /note="This region represents a CpG dinucleotide"
  misc_feature (61)..(61): /note="Nucleotide may be methylated to form 5-methylcytosine"
gtggatgctggtccagagagatgctggtccagatgctggtccagatacttcctatagtcccggctataggaagctctaggatgaagtcccagagatgggagcttatgtgtggttggaagaca

SEQ ID NO: 23275 - DNA, 122 bp, Homo sapiens
  misc_feature (61)..(62): /note="This region represents a CpG dinucleotide"
  misc_feature (61)..(61): /note="Nucleotide may be methylated to form 5-methylcytosine"
ttcttatttgccatgagccgaggaatgcacaggtactaactagatggtgtggacagctgacgcaaactgggcatatacaatgggacacacctgtactaggatgaaaggcacagcctagaggg

SEQ ID NO: 23276 - DNA, 122 bp, Homo sapiens
  misc_feature (61)..(62): /note="This region represents a CpG dinucleotide"
  misc_feature (61)..(61): /note="Nucleotide may be methylated to form 5-methylcytosine"
ctctgcttgtatcttgtgttgtagcacaaggaggtgcccttggaaacatgcagacacactcgtagccctcaccatcagcagtgagttgtgagagtttggtcaagttgcttaacttccagtcc

SEQ ID NO: 23277 - DNA, 122 bp, Homo sapiens
  misc_feature (61)..(62): /note="This region represents a CpG dinucleotide"
  misc_feature (61)..(61): /note="Nucleotide may be methylated to form 5-methylcytosine"
aggaggcagtcacatgtgtgtgctgtgagctgcacattccatcctagccttagtgaggaccgtattagtccctgcacgctcatccttgccagctcagactggagccaagcattaaactgttc

SEQ ID NO: 23278 - DNA, 122 bp, Homo sapiens
  misc_feature (61)..(62): /note="This region represents a CpG dinucleotide"
  misc_feature (61)..(61): /note="Nucleotide may be methylated to form 5-methylcytosine"
aataaacaaaagcagctaccacttctagaatgctccatgtgcgatgagaactattctaagcggctgtgagtagtaactgacacaatgcataagcagccagcaattccattctgctgggctgg

SEQ ID NO: 23279 - DNA, 122 bp, Homo sapiens
  misc_feature (61)..(62): /note="This region represents a CpG dinucleotide"
  misc_feature (61)..(61): /note="Nucleotide may be methylated to form 5-methylcytosine"
cccactaattaaacagtcacccagcaggtagtttgagagaggatatgaaaaagggaagtgcggccttactcttgcaggggtgcgtctctgtcttccatcagttgatagcacaatgcttaacc

SEQ ID NO: 23280 - DNA, 122 bp, Homo sapiens
  misc_feature (61)..(62): /note="This region represents a CpG dinucleotide"
  misc_feature (61)..(61): /note="Nucleotide may be methylated to form 5-methylcytosine"
ctctggggaggaaggttggaggctaagtttgcttgcagggaatgggtgcggttgagcgcccgggcctggccagagcctcccagtttacatcctgcttccctgttgccaatccgactcccggg

SEQ ID NO: 23281 - DNA, 122 bp, Homo sapiens
  misc_feature (61)..(62): /note="This region represents a CpG dinucleotide"
  misc_feature (61)..(61): /note="Nucleotide may be methylated to form 5-methylcytosine"
aaggacacatgctgggaagcattaaatcaaggtgctgctcttctgtcaaactacggttgccgtggcctcctgaagaggaaaggtttggccaggcgggggcaggcccgacctttgctgaggct

SEQ ID NO: 23282 - DNA, 122 bp, Homo sapiens
  misc_feature (61)..(62): /note="This region represents a CpG dinucleotide"
  misc_feature (61)..(61): /note="Nucleotide may be methylated to form 5-methylcytosine"
aatctgctactgtattcaacactctaagggagtgaggagtttacttgattcagcggtaaacgcagagctctggtaggaggtattaatactacttatcagcaaaggttactagcttgcaaaat

SEQ ID NO: 23283 - DNA, 122 bp, Homo sapiens
  misc_feature (61)..(62): /note="This region represents a CpG dinucleotide"
  misc_feature (61)..(61): /note="Nucleotide may be methylated to form 5-methylcytosine"
ccttagtttagcaggtaggctctatcttttgccatttctgtattttatgtgctgtgttcccgtttcactgggtatgaactgtgaaatcgactgaatcctggccactttatgagtttgtttgg

SEQ ID NO: 23284 - DNA, 122 bp, Homo sapiens
  misc_feature (61)..(62): /note="This region represents a CpG dinucleotide"
  misc_feature (61)..(61): /note="Nucleotide may be methylated to form 5-methylcytosine"
ctgctgtacaggttttagcctaggagtctctaccacatcgcctaggtgtatagtaggctacgctatctaggtttgtgtaagtacaccctatgatgttcacacaacaatatcacccagtgaca

SEQ ID NO: 23285 - DNA, 122 bp, Homo sapiens
  misc_feature (61)..(62): /note="This region represents a CpG dinucleotide"
  misc_feature (61)..(61): /note="Nucleotide may be methylated to form 5-methylcytosine"
acaggcagccagggctacagaatcagaaaacatctggcgactctggaaggctcagctggccgccaaacacacaggcctccagttatggacaccagccagcgggcacctcctgcctgcgtgtg

SEQ ID NO: 23286 - DNA, 122 bp, Homo sapiens
  misc_feature (61)..(62): /note="This region represents a CpG dinucleotide"
  misc_feature (61)..(61): /note="Nucleotide may be methylated to form 5-methylcytosine"
gcagctgcatgacagcacccactaacttgaggaagccagccgaggggccagcttcctgagcgtgattcaaaccggaactaagggtgcagctgacaagagtttgtcaacagccattgaagtaa

SEQ ID NO: 23287 - DNA, 122 bp, Homo sapiens
  misc_feature (61)..(62): /note="This region represents a CpG dinucleotide"
  misc_feature (61)..(61): /note="Nucleotide may be methylated to form 5-methylcytosine"
aaaacagggttaagagatgggtaagaaaataggtctctttactttccttggtatagtgaacgttattatacatgttgtatttaaatgtttttgacctaacttgattgacaacaatgtaaaca

SEQ ID NO: 23288 - DNA, 122 bp, Homo sapiens
  misc_feature (61)..(62): /note="This region represents a CpG dinucleotide"
  misc_feature (61)..(61): /note="Nucleotide may be methylated to form 5-methylcytosine"
cagggactgggccacatcccctcttccagctttaagatctgggatttgagactgcatcaccggcctcaacactaagacttctttgcaggcctaagctctggaatgccacagaagcccccagg

SEQ ID NO: 23289 - DNA, 122 bp, Homo sapiens
  misc_feature (61)..(62): /note="This region represents a CpG dinucleotide"
  misc_feature (61)..(61): /note="Nucleotide may be methylated to form 5-methylcytosine"
ctgacctagcagtcaacatgaaggctctcattgttctggggcttgtcctcctttctgttacggtccagggcaaggtctttgaaaggtgtgagttggccagaactctgaaaagattgggaatg

SEQ ID NO: 23290 - DNA, 122 bp, Homo sapiens
  misc_feature (61)..(62): /note="This region represents a CpG dinucleotide"
  misc_feature (61)..(61): /note="Nucleotide may be methylated to form 5-methylcytosine"
tcagaagtgcccagggtgctagtttagtactcacctcacagggtagatgtcaggattaaacgggataattcaagcaaagtacttgggaccagacttcatgagtaataacgactcattgttgc

SEQ ID NO: 23291 - DNA, 122 bp, Homo sapiens
  misc_feature (61)..(62): /note="This region represents a CpG dinucleotide"
  misc_feature (61)..(61): /note="Nucleotide may be methylated to form 5-methylcytosine"
cagtaccccagagcctccagcctggcagtccgggctccaggtacctctagagggctgtggcgcacactatgcataagtcacagggacactggcatgaactggtaagtccagatgacagtgac

SEQ ID NO: 23292 - DNA, 122 bp, Homo sapiens
  misc_feature (61)..(62): /note="This region represents a CpG dinucleotide"
  misc_feature (61)..(61): /note="Nucleotide may be methylated to form 5-methylcytosine"
taagccacagtgcagaagtggacccattactcacactaccttcaaaggacacagagttctcgctgctcaaaggaaggggttagtcatcacctactgctaagaccaaaagccttggggcatca

SEQ ID NO: 23293 - DNA, 122 bp, Homo sapiens
  misc_feature (61)..(62): /note="This region represents a CpG dinucleotide"
  misc_feature (61)..(61): /note="Nucleotide may be methylated to form 5-methylcytosine"
cagggaaaaaagaaacaatcagggaaatacttaaatcatgatacagccactggagaactacgcagtctttgatgtcgcaacagagaaatgttatttgaaaaaggaggatacaggccaggcgt

SEQ ID NO: 23294 - DNA, 122 bp, Homo sapiens
  misc_feature (61)..(62): /note="This region represents a CpG dinucleotide"
  misc_feature (61)..(61): /note="Nucleotide may be methylated to form 5-methylcytosine"
ggctgggcgcccttggtcacattgttggtgctcagagcctcagttcccacagctgtgcagcgagaggaagctgacggcaccgaccatggctgtggaggcctcatgtgtcaattgttgctgtt

SEQ ID NO: 23295 - DNA, 122 bp, Homo sapiens
  misc_feature (61)..(62): /note="This region represents a CpG dinucleotide"
  misc_feature (61)..(61): /note="Nucleotide may be methylated to form 5-methylcytosine"
agtcagatgataaattttgtttttctggtccccagtgagccagaggccaaacacagcacacgttgtctctgaaaagaagaggatggaccagcctaagaaggtaaatgggtcctgggcgggat

SEQ ID NO: 23296 - DNA, 122 bp, Homo sapiens
  misc_feature (61)..(62): /note="This region represents a CpG dinucleotide"
  misc_feature (61)..(61): /note="Nucleotide may be methylated to form 5-methylcytosine"
ctgcactgaagactcggaggggttgagccgctggagccacgcaaattcagacacctcttccgccccaggtcactctactcgcccacgctgcctgccacacccatccggttgtgcgggacact

SEQ ID NO: 23297 - DNA, 122 bp, Homo sapiens
  misc_feature (61)..(62): /note="This region represents a CpG dinucleotide"
  misc_feature (61)..(61): /note="Nucleotide may be methylated to form 5-methylcytosine"
cacagggaggaagagacaaacaggagctggaggaagtggaagagaggagaagagaacctacggcagagaaagaactgtaggtttcccttggattaaagactcttcaaagctgcatggagagg

SEQ ID NO: 23298 - DNA, 122 bp, Homo sapiens
  misc_feature (61)..(62): /note="This region represents a CpG dinucleotide"
  misc_feature (61)..(61): /note="Nucleotide may be methylated to form 5-methylcytosine"
gaagtttagaggccagcagtttgtggtgggaatggcagcgcctctgtcatcagacacccacgctgcctcttcctttctgctcactgtcctggccacttccgcctgtgtctcactggccagat

SEQ ID NO: 23299 - DNA, 122 bp, Homo sapiens
  misc_feature (61)..(62): /note="This region represents a CpG dinucleotide"
  misc_feature (61)..(61): /note="Nucleotide may be methylated to form 5-methylcytosine"
gccaatccctcactgattacctgattaaaaagtgatttattccaagggacacagggctctcgaaacaatcaaggaagtggaattctgccagttacacactctttgggtgaccagtatccaga

SEQ ID NO: 23300 - DNA, 122 bp, Homo sapiens
  misc_feature (61)..(62): /note="This region represents a CpG dinucleotide"
  misc_feature (61)..(61): /note="Nucleotide may be methylated to form 5-methylcytosine"
attaggaatttcctttcttcctggcactatttgctatcatgtggtcatatcttcataaatcggtgcattatttttcctaagagaatacagaatagagccagatactgtgtcttctgtttctt

SEQ ID NO: 23301 - DNA, 122 bp, Homo sapiens
  misc_feature (61)..(62): /note="This region represents a CpG dinucleotide"
  misc_feature (61)..(61): /note="Nucleotide may be methylated to form 5-methylcytosine"
ttttctttacatttgtgttgtgttttctaactcactgtaatgctttagctctcagtcatacgtgaaacccaatttccataagcaattaataataggaaaactcaaggatgttactttaaaat

SEQ ID NO: 23302 - DNA, 122 bp, Homo sapiens
  misc_feature (61)..(62): /note="This region represents a CpG dinucleotide"
  misc_feature (61)..(61): /note="Nucleotide may be methylated to form 5-methylcytosine"
agagaaccagtgtgtgcagccaatgttaatgtgacaaaaagtgcagagttagtcccagagcgtgaagtcctccctgtcctaggcccaggtggaggccaggagctgctccccgggctgcctgg

SEQ ID NO: 23303 - DNA, 122 bp, Homo sapiens
  misc_feature (61)..(62): /note="This region represents a CpG dinucleotide"
  misc_feature (61)..(61): /note="Nucleotide may be methylated to form 5-methylcytosine"
cccaaactcacacaccagcaaagcatactagactaggtgacctcctgctctccgactgtacgcaccctggcctagcataggaagcagaagttacatttaaaacgaaacagtcaccatgcgtt

SEQ ID NO: 23304 - DNA, 122 bp, Homo sapiens
  misc_feature (61)..(62): /note="This region represents a CpG dinucleotide"
  misc_feature (61)..(61): /note="Nucleotide may be methylated to form 5-methylcytosine"
tacatcccagcccagccacacgccatgccaggtacacagcaggtgcccctggaagaggagcgtctaaagataacacaacaagataacaaggaggacgccgcctgcctaacgtgtaaataaca

SEQ ID NO: 23305 - DNA, 122 bp, Homo sapiens
  misc_feature (61)..(62): /note="This region represents a CpG dinucleotide"
  misc_feature (61)..(61): /note="Nucleotide may be methylated to form 5-methylcytosine"
aaatctctagtgccttctttttattctcgcctgtagaatttctcctaatgcttttagatacggcaattccactttctaaaatcctttcatgatatccccttctttccacgtttgtcagaaat

SEQ ID NO: 23306 - DNA, 122 bp, Homo sapiens
  misc_feature (61)..(62): /note="This region represents a CpG dinucleotide"
  misc_feature (61)..(61): /note="Nucleotide may be methylated to form 5-methylcytosine"
aaataagttttgttcctaacactctttgtgatatgaagtattcttgctaatcaagctgcccggagactggcgtttcccagagcagtttcgaaagtggaaatgatgctgcatttcctacccac

SEQ ID NO: 23307 - DNA, 122 bp, Homo sapiens
  misc_feature (61)..(62): /note="This region represents a CpG dinucleotide"
  misc_feature (61)..(61): /note="Nucleotide may be methylated to form 5-methylcytosine"
gaaataccatttaaatgatgtgccttggttcacacagctagtatgtgggccgcagagcctcgccccacatttgtttgttcttggctgaacactatgaatggtgggattgaggactaagtctt

SEQ ID NO: 23308 - DNA, 122 bp, Homo sapiens
  misc_feature (61)..(62): /note="This region represents a CpG dinucleotide"
  misc_feature (61)..(61): /note="Nucleotide may be methylated to form 5-methylcytosine"
cccaggggcctcccacggccacctcggcgccgccacgcgtggccccgcccccaggccgcccgcccgcgcgtcccctggccccgcactcacacttcgccctcgggggtatacgtggtacccga

SEQ ID NO: 23309 - DNA, 122 bp, Homo sapiens
  misc_feature (61)..(62): /note="This region represents a CpG dinucleotide"
  misc_feature (61)..(61): /note="Nucleotide may be methylated to form 5-methylcytosine"
caactgaaggctgatgtcgtggtcacctcccagccagttgaagggctgctggggcactgacggtagacaagacatctgaagccagttagtaagactccagggcttacgaatactgcccagtt

SEQ ID NO: 23310 - DNA, 122 bp, Homo sapiens
  misc_feature (61)..(62): /note="This region represents a CpG dinucleotide"
  misc_feature (61)..(61): /note="Nucleotide may be methylated to form 5-methylcytosine"
ctgggtgccaccaaccagcctagcaggtgattgcagagcccccagtggtcaaggtggacccggccagcccaacacaccggcccaatgcaccggcccaagcgcttcctgctggactggctggg

SEQ ID NO: 23311 - DNA, 122 bp, Homo sapiens
  misc_feature (61)..(62): /note="This region represents a CpG dinucleotide"
  misc_feature (61)..(61): /note="Nucleotide may be methylated to form 5-methylcytosine"
gaggaccacaatttttccatctgtcagatgggcttgggagcctttgtcctggctggctgccggctggcctgggctgggactggcctgggaggtgaggggactgtggcgggaaggaggaagca

SEQ ID NO: 23312 - DNA, 122 bp, Homo sapiens
  misc_feature (61)..(62): /note="This region represents a CpG dinucleotide"
  misc_feature (61)..(61): /note="Nucleotide may be methylated to form 5-methylcytosine"
cttctccatctccatgtcaggacgtgcactcgccgatgaagtgtccacccaagatggcgacgggtgagcacgggcacgtgtggcccgggcgaggtctgtgtggtgctgaacgcctcctctgc

SEQ ID NO: 23313 - DNA, 122 bp, Homo sapiens
  misc_feature (61)..(62): /note="This region represents a CpG dinucleotide"
  misc_feature (61)..(61): /note="Nucleotide may be methylated to form 5-methylcytosine"
atcctccactcacactggctctttgtggtatccttcatggttttccctaagcccctgacacgttgctttttctactctggagaaacagagacccactccacttttcactgggtggtcttcaa

SEQ ID NO: 23314 - DNA, 122 bp, Homo sapiens
  misc_feature (61)..(62): /note="This region represents a CpG dinucleotide"
  misc_feature (61)..(61): /note="Nucleotide may be methylated to form 5-methylcytosine"
agaatagtcctgctccctcttgtccactgaagttcatgtctacgtgtgcatgcatagatgcgtgtctgtgcaggccaggatgtgtgtggttgtgtataagctagcctgcacacgtctgagtg

SEQ ID NO: 23315 - DNA, 122 bp, Homo sapiens
  misc_feature (61)..(62): /note="This region represents a CpG dinucleotide"
  misc_feature (61)..(61): /note="Nucleotide may be methylated to form 5-methylcytosine"
cagagcaccttacatgaccacataaaccacaagcctcccccatcttctctattattagagcgtccttaagcacacaaccaggctgcagatctaagaggagaagggtcctatactaaacggtg

SEQ ID NO: 23316 - DNA, 122 bp, Homo sapiens
  misc_feature (61)..(62): /note="This region represents a CpG dinucleotide"
  misc_feature (61)..(61): /note="Nucleotide may be methylated to form 5-methylcytosine"
cagtgagtcgtagatgattcctccagatcttgacgaggcccacaggcccttgtttaagaacgtcgcttgctgctttgctgcttctatggggcacattctggtgataaaggccagctgttttt

SEQ ID NO: 23317 - DNA, 122 bp, Homo sapiens
  misc_feature (61)..(62): /note="This region represents a CpG dinucleotide"
  misc_feature (61)..(61): /note="Nucleotide may be methylated to form 5-methylcytosine"
aactcctcctgaagttcagctgcaggtcaacatcttgacgggcattgaggtaaacaccagcgttcattgttttttggctgccatcgtaaaccttagcattaggaaatatattgatttgtatc

SEQ ID NO: 23318 - DNA, 122 bp, Homo sapiens
  misc_feature (61)..(62): /note="This region represents a CpG dinucleotide"
  misc_feature (61)..(61): /note="Nucleotide may be methylated to form 5-methylcytosine"
ggtgcctgtcatagcagccagctgccaccagaacacagtaatgacccagcagcccctgcacgttagcccaatcatctgggacaggggagcaaaaacgggttgtttaccaccaccacagctga

SEQ ID NO: 23319 - DNA, 122 bp, Homo sapiens
  misc_feature (61)..(62): /note="This region represents a CpG dinucleotide"
  misc_feature (61)..(61): /note="Nucleotide may be methylated to form 5-methylcytosine"
tgtgggtgggcagtaaagccagctgtcagggttgcaggcccggacttggtcctggattgtcgcctgtggatcagtttggcctcacacattctggaaaggcagaacatttttttgctatacaa

SEQ ID NO: 23320 - DNA, 122 bp, Homo sapiens
  misc_feature (61)..(62): /note="This region represents a CpG dinucleotide"
  misc_feature (61)..(61): /note="Nucleotide may be methylated to form 5-methylcytosine"
gacccaggagtgctgggtcggttcagttgaactccttgggacccgtggattaggtggcctcgtagacaaaatgcccaaatgcacaggcctgctggcatctaccttgagccaaccaggtggtg

SEQ ID NO: 23321 - DNA, 122 bp, Homo sapiens
  misc_feature (61)..(62): /note="This region represents a CpG dinucleotide"
  misc_feature (61)..(61): /note="Nucleotide may be methylated to form 5-methylcytosine"
agctaaaaagagcccaacacacagtgaggagccaagttcaatcagacctaggacttgaagcgcagttgctcagccaagtgcagcctagttcatctgactcagctgactcacactctacatgc

SEQ ID NO: 23322 - DNA, 122 bp, Homo sapiens
  misc_feature (61)..(62): /note="This region represents a CpG dinucleotide"
  misc_feature (61)..(61): /note="Nucleotide may be methylated to form 5-methylcytosine"
agagaccagcatggcaggagcaaatgagcgagaggaagagcggtggaagatgaggccagacggttcaatgcatctcgaagggtctggagaccatgtaaagagcttagtctttgtccatttgg

SEQ ID NO: 23323 - DNA, 122 bp, Homo sapiens
  misc_feature (61)..(62): /note="This region represents a CpG dinucleotide"
  misc_feature (61)..(61): /note="Nucleotide may be methylated to form 5-methylcytosine"
gcatttgtggagggaagggacttgtttgtctcttgtctggatttagacagaaggttctcacggcccttgtgcttttttgaaatctttcctctcacctagtattgtgttggccacataggaag

SEQ ID NO: 23324 - DNA, 122 bp, Homo sapiens
  misc_feature (61)..(62): /note="This region represents a CpG dinucleotide"
  misc_feature (61)..(61): /note="Nucleotide may be methylated to form 5-methylcytosine"
atcttagcctcagagccctgaaatctaatagcaatttaaggaacactttttcattttcttcgagtacattttcaatgatctttttaaccctcagttgtcctttcttttcttctaacttctat

SEQ ID NO: 23325 - DNA, 122 bp, Homo sapiens
  misc_feature (61)..(62): /note="This region represents a CpG dinucleotide"
  misc_feature (61)..(61): /note="Nucleotide may be methylated to form 5-methylcytosine"
tcccccattacccaatcccagccacttccttcaccacctccggtcctactcattttgcttcggctagtgaaatctaggcttctctgttgaaagtcccccgctacttacctcagagtggtttc

SEQ ID NO: 23326 - DNA, 122 bp, Homo sapiens
  misc_feature (61)..(62): /note="This region represents a CpG dinucleotide"
  misc_feature (61)..(61): /note="Nucleotide may be methylated to form 5-methylcytosine"
attggcaggagggtgttggaggcagagtagttggatggctggaaggacttacagcctgcgcgcagctcaacctggtccaggatctgcaggctgttgccccagttcaggcagcaggagagaaa

SEQ ID NO: 23327 - DNA, 122 bp, Homo sapiens
  misc_feature (61)..(62): /note="This region represents a CpG dinucleotide"
  misc_feature (61)..(61): /note="Nucleotide may be methylated to form 5-methylcytosine"
cccagtgttggaggcagggactggtgggaggtgtctgggtcatggagcagttccctcatgcgtgacttgctgctgcgggagagctgcttattaaagagtctgaaacctctcccatctgttgc

SEQ ID NO: 23328 - DNA, 122 bp, Homo sapiens
  misc_feature (61)..(62): /note="This region represents a CpG dinucleotide"
  misc_feature (61)..(61): /note="Nucleotide may be methylated to form 5-methylcytosine"
gtctgcctagccctttcctgtttactttttaatcaaagcctgggatgagaacatcgatgacgaatttatcagttttgtcagtgatctgaagtcaggaaggaatgccaatatgatggatgcca

SEQ ID NO: 23329 - DNA, 122 bp, Homo sapiens
  misc_feature (61)..(62): /note="This region represents a CpG dinucleotide"
  misc_feature (61)..(61): /note="Nucleotide may be methylated to form 5-methylcytosine"
tcatctctagcctgtttgctccccttggagtgacactgacatgctttcttgccagctaatcgggaggtgtttctgatggtgccccaggtgccctatgtctgacctgcagaagctgcagaacc

SEQ ID NO: 23330 - DNA, 122 bp, Homo sapiens
  misc_feature (61)..(62): /note="This region represents a CpG dinucleotide"
  misc_feature (61)..(61): /note="Nucleotide may be methylated to form 5-methylcytosine"
aaggtagtaagaccgtatagtcagcaaccacatccttagtaataagtgttagtataatcccgtatgtatgaaagactattgtgtaaaaaggacaaaaaattagcatacaacacaaacaccag

SEQ ID NO: 23331 - DNA, 122 bp, Homo sapiens
  misc_feature (61)..(62): /note="This region represents a CpG dinucleotide"
  misc_feature (61)..(61): /note="Nucleotide may be methylated to form 5-methylcytosine"
caaagcagtcgcccgtcctggttctccaggatgcctgggtcagagcatgaataaccaccccgctccccacgcacggagcctcgcagtggctcgagctgagaatcaaagcggccgatccaggg

SEQ ID NO: 23332 - DNA, 122 bp, Homo sapiens
  misc_feature (61)..(62): /note="This region represents a CpG dinucleotide"
  misc_feature (61)..(61): /note="Nucleotide may be methylated to form 5-methylcytosine"
ccctaaactagaagagctagtcagcctctgccaggaactagcttgaatccacaaatgccacgcttgtcaggcccatcctggctttgcatccccactctctctccaccctcaagcctgccttt

SEQ ID NO: 23333 - DNA, 122 bp, Homo sapiens
  misc_feature (61)..(62): /note="This region represents a CpG dinucleotide"
  misc_feature (61)..(61): /note="Nucleotide may be methylated to form 5-methylcytosine"
aaaaaaaatctgcacaagaatttatacacaagaccttgcatgtaactttagactactcaacgatgtcctatgaagcctgcatagatcccccagaccctggtgtctacaggccccagattaag

SEQ ID NO: 23334 - DNA, 122 bp, Homo sapiens
  misc_feature (61)..(62): /note="This region represents a CpG dinucleotide"
  misc_feature (61)..(61): /note="Nucleotide may be methylated to form 5-methylcytosine"
aggattaaatgagctcattcacatagagtgcttagcacaatgcctggtacataccaaacacgcaataactgttaatagttacttagtagtcacagctcagaaatcaggattggcactacctg

SEQ ID NO: 23335 - DNA, 122 bp, Homo sapiens
  misc_feature (61)..(62): /note="This region represents a CpG dinucleotide"
  misc_feature (61)..(61): /note="Nucleotide may be methylated to form 5-methylcytosine"
aacccctttcctctctgctctcccctcaaaacaagtttcaggatcttgcaggcctcgcggcgtcgttcttcgttgtggcggcctgtggctctttgaaaaacacgacgaggcctgcaaaatgc

SEQ ID NO: 23336 - DNA, 122 bp, Homo sapiens
  misc_feature (61)..(62): /note="This region represents a CpG dinucleotide"
  misc_feature (61)..(61): /note="Nucleotide may be methylated to form 5-methylcytosine"
caagctgaatgcaggcctcacctccccactgtgttgcttccgtgggctactcagagtcaccgggaagttcccacaggagtcataatcactgaatcactctctggctttctagttaatgtttt

SEQ ID NO: 23337 - DNA, 122 bp, Homo sapiens
  misc_feature (61)..(62): /note="This region represents a CpG dinucleotide"
  misc_feature (61)..(61): /note="Nucleotide may be methylated to form 5-methylcytosine"
gtccctcaaggctgcccaggccaggcaggggtttctctgcagtctcagctgggtgaggcccggccgggcaggcaggagggaggaaggcacagtctcctgaggcggagttggggactgacggg

SEQ ID NO: 23338 - DNA, 122 bp, Homo sapiens
  misc_feature (61)..(62): /note="This region represents a CpG dinucleotide"
  misc_feature (61)..(61): /note="Nucleotide may be methylated to form 5-methylcytosine"
aaattcagggggacccagcttcccccaagaacacacagctggctcttggccaagcctggccgggagcgaccttcttctgactttacggagtgtgttttcactacactcagtctctgatttta

SEQ ID NO: 23339 - DNA, 122 bp, Homo sapiens
  misc_feature (61)..(62): /note="This region represents a CpG dinucleotide"
  misc_feature (61)..(61): /note="Nucleotide may be methylated to form 5-methylcytosine"
aaattcatttcttgtcgccacctagattaacaaatctcagattaagaactggccttttttcgcctcctctttgaattcactgtctaaagaaacggccattgccctttccgtaaaccaggaca

SEQ ID NO: 23340 - DNA, 122 bp, Homo sapiens
  misc_feature (61)..(62): /note="This region represents a CpG dinucleotide"
  misc_feature (61)..(61): /note="Nucleotide may be methylated to form 5-methylcytosine"
agtttcttggtgtacttggagcacataatctaagcctttttcctgatgacagtgtccttgcgtgaggctgtacattatgggacctgacagcttaacaagacaatatctgcttttacaaactc

SEQ ID NO: 23341 - DNA, 122 bp, Homo sapiens
  misc_feature (61)..(62): /note="This region represents a CpG dinucleotide"
  misc_feature (61)..(61): /note="Nucleotide may be methylated to form 5-methylcytosine"
tgtctgcttaggaaatctttgcccacttcccactggagtgtgactcacttcttactccaccgctgtgaggtccttgcaggcagggactaactcttactctgctctgtatattctgagcctca

SEQ ID NO: 23342 - DNA, 122 bp, Homo sapiens
  misc_feature (61)..(62): /note="This region represents a CpG dinucleotide"
  misc_feature (61)..(61): /note="Nucleotide may be methylated to form 5-methylcytosine"
attgtatcatccagcctccttccagcagctctctccagttcttgtctgtgatgatgcgtacgttgctctgccgcctgtgggtccagggagcacccccaagcaacagtaccaggactgccagc

SEQ ID NO: 23343 - DNA, 122 bp, Homo sapiens
  misc_feature (61)..(62): /note="This region represents a CpG dinucleotide"
  misc_feature (61)..(61): /note="Nucleotide may be methylated to form 5-methylcytosine"
ggccaccaaggggaaagttacttaactaattcaggaaggtgtggtggcctccaagggagacgctgagggcctgcttggggtgggcttgataataatggagagtggaggccaggtgtggtggc

SEQ ID NO: 23344 - DNA, 122 bp, Homo sapiens
  misc_feature (61)..(62): /note="This region represents a CpG dinucleotide"
  misc_feature (61)..(61): /note="Nucleotide may be methylated to form 5-methylcytosine"
actagctacagccctctaatccacacgccatgcttcagtgaaagtgttattcatttttaccgtgcttgtcacttggggcaggtgtgctcacagtggccagcccatcttgaacttgtgcttgt

SEQ ID NO: 23345 - DNA, 122 bp, Homo sapiens
  misc_feature (61)..(62): /note="This region represents a CpG dinucleotide"
  misc_feature (61)..(61): /note="Nucleotide may be methylated to form 5-methylcytosine"
atcacctgcagatgcggttaagcaacttgcagaggccccagggctgagccaccgcagaaccggagctggaaaccagtcctatgactcctgaggcagtgctctttctactacctggccatggc

SEQ ID NO: 23346 - DNA, 122 bp, Homo sapiens
  misc_feature (61)..(62): /note="This region represents a CpG dinucleotide"
  misc_feature (61)..(61): /note="Nucleotide may be methylated to form 5-methylcytosine"
gtcaccgtctgtctcccacacactcggtcacattttcacacaagtcaaatcacacgaggacggaactgggggaagtaaccatgcagtcatttcccaggggtacaaagaaactcacatagagc

SEQ ID NO: 23347 - DNA, 122 bp, Homo sapiens
  misc_feature (61)..(62): /note="This region represents a CpG dinucleotide"
  misc_feature (61)..(61): /note="Nucleotide may be methylated to form 5-methylcytosine"
tggattctatttaacactgttaaccaaccacaagtcttaagtgccactgtttttgccaaacgaaaccaaatctaagcatgcagcctgtgttaccaccctctgggtgctgattccgattgttt

SEQ ID NO: 23348 - DNA, 122 bp, Homo sapiens
  misc_feature (61)..(62): /note="This region represents a CpG dinucleotide"
  misc_feature (61)..(61): /note="Nucleotide may be methylated to form 5-methylcytosine"
cagttggagccctggggtgtcttggccggccctcagactgtggagcacctgacgctcagccggtcctctggtcctgggggcccctgcttggactcatgcagaggtgaaggggagggagaagg

SEQ ID NO: 23349 - DNA, 122 bp, Homo sapiens
  misc_feature (61)..(62): /note="This region represents a CpG dinucleotide"
  misc_feature (61)..(61): /note="Nucleotide may be methylated to form 5-methylcytosine"
ttggcttgactcttagctgaactcaccaaaaataatttctgtaagagactgagacgtctacgagtaggtttttcagaattagtaaacataaatcaaggatacacaggtagatttgaatttca

SEQ ID NO: 23350 - DNA, 122 bp, Homo sapiens
  misc_feature (61)..(62): /note="This region represents a CpG dinucleotide"
  misc_feature (61)..(61): /note="Nucleotide may be methylated to form 5-methylcytosine"
gaaagggcctccaagttaatggtggcatgaataattcaccggcccctagaattagtaagccgatccctgggtacttcctttactcactgtaaagtgacggatctggtgtcaccaggtttaca

SEQ ID NO: 23351 - DNA, 122 bp, Homo sapiens
  misc_feature (61)..(62): /note="This region represents a CpG dinucleotide"
  misc_feature (61)..(61): /note="Nucleotide may be methylated to form 5-methylcytosine"
aaagatgaaaccagcactttcctcccggcctatggtggaactaagtgatacttagtgttccgcttatggaggaaatggtgacacttcctgatgtaggtttggcactcggaaagcgctgggca

SEQ ID NO: 23352 - DNA, 122 bp, Homo sapiens
  misc_feature (61)..(62): /note="This region represents a CpG dinucleotide"
  misc_feature (61)..(61): /note="Nucleotide may be methylated to form 5-methylcytosine"
tcgcattgcctgcatgcctgggatgcacggatctgtggtgggatttgccctgtctgtgtgcgaggttgtggagtggtcatgggtctgcgtttggtggtgtgcaactggtgtacaggaccaga

SEQ ID NO: 23353 - DNA, 122 bp, Homo sapiens
  misc_feature (61)..(62): /note="This region represents a CpG dinucleotide"
  misc_feature (61)..(61): /note="Nucleotide may be methylated to form 5-methylcytosine"
tacaaatgaaagagcactaatgcctacattaacacctgtttgtcattatcttcaatttaacggctttatttcagacacgaagtatctgacaaattatccatccaaattcactggtcaggaca

SEQ ID NO: 23354 - DNA, 122 bp, Homo sapiens
  misc_feature (61)..(62): /note="This region represents a CpG dinucleotide"
  misc_feature (61)..(61): /note="Nucleotide may be methylated to form 5-methylcytosine"
tactacctaatagagctgtttcatctgtcaagaatgtgcctcctcctgatatctgcatttcgtcttagcgtatttgtttctttttagcattgtcaaggaatgactcaaagatacttagttgg

SEQ ID NO: 23355 - DNA, 122 bp, Homo sapiens
  misc_feature (61)..(62): /note="This region represents a CpG dinucleotide"
  misc_feature (61)..(61): /note="Nucleotide may be methylated to form 5-methylcytosine"
aacctgggagttgttctttactcttccctttctttctacataaagtcaatcaccaagtcccgtccataaatatttatgtaatgagtgacttcctctttgtctctgcccttgttcatgtagcg

SEQ ID NO: 23356 - DNA, 122 bp, Homo sapiens
  misc_feature (61)..(62): /note="This region represents a CpG dinucleotide"
  misc_feature (61)..(61): /note="Nucleotide may be methylated to form 5-methylcytosine"
gccccgtcattccaaaatggctgtttcctttctgctatcaaaacagaatatgtttagcttcgggtacatactaatctctaatattttctttccttacaaaaacaacttcatttcaatactta

SEQ ID NO: 23357 - DNA, 122 bp, Homo sapiens
  misc_feature (61)..(62): /note="This region represents a CpG dinucleotide"
  misc_feature (61)..(61): /note="Nucleotide may be methylated to form 5-methylcytosine"
ggccttgcgcaaacactgcacttgtatcgggctttgctaaggtggagcgcagaccctgcacgttctgtttagcaatgaaagatgtaaacagtgccttaacagtggggccatctccctgccct

SEQ ID NO: 23358 - DNA, 122 bp, Homo sapiens
  misc_feature (61)..(62): /note="This region represents a CpG dinucleotide"
  misc_feature (61)..(61): /note="Nucleotide may be methylated to form 5-methylcytosine"
aagtctagcagacggctggcgtcaccgcatagaggatgtcccggtggccaggagagggaacgcagcccggctcgcttgggagtcattcttgcctaaccaaagccctgaagcagctctgctgt

SEQ ID NO: 23359 - DNA, 122 bp, Homo sapiens
  misc_feature (61)..(62): /note="This region represents a CpG dinucleotide"
  misc_feature (61)..(61): /note="Nucleotide may be methylated to form 5-methylcytosine"
cctgtggctcccgctccttccgctcctcccgctcctccctcacacggaggctcctccctgcgcgggcactgcccagacaagcagcctacggccctcccgcggctgccccgcccccatctgca

SEQ ID NO: 23360 - DNA, 122 bp, Homo sapiens
  misc_feature (61)..(62): /note="This region represents a CpG dinucleotide"
  misc_feature (61)..(61): /note="Nucleotide may be methylated to form 5-methylcytosine"
aaattattcgttgtttatctgaaattcaaatttgagtacgtgtgctgttttcttatctagcggacctacctcccggtgcttctgatacccgctggtgttgatcaagcaaaacatgtgtatga

SEQ ID NO: 23361 - DNA, 122 bp, Homo sapiens
  misc_feature (61)..(62): /note="This region represents a CpG dinucleotide"
  misc_feature (61)..(61): /note="Nucleotide may be methylated to form 5-methylcytosine"
agcatttcccaataaggaaaggatataaggtatgggctggaacatgcctgggcacattcacgcatgcctgagcttgctagaacaagcactgaggttagagtataaatatatataatatgctt

SEQ ID NO: 23362 - DNA, 122 bp, Homo sapiens
  misc_feature (61)..(62): /note="This region represents a CpG dinucleotide"
  misc_feature (61)..(61): /note="Nucleotide may be methylated to form 5-methylcytosine"
ccatggcatgctatcaccaacccatccaagggcccccagaggcacagacacactttttaacggccgccaactcaataggtgacatggagcttagtcacacagttcaggagctcaaaggatta

SEQ ID NO: 23363 - DNA, 122 bp, Homo sapiens
  misc_feature (61)..(62): /note="This region represents a CpG dinucleotide"
  misc_feature (61)..(61): /note="Nucleotide may be methylated to form 5-methylcytosine"
actggaacagaggaggaactggttacagtaatcatcattcccctgtgaacaaaggtctcacgcagtcatttctcctcagtgtgttttcggcttcacagaatgactgtgagacaatgttgatc

SEQ ID NO: 23364 - DNA, 122 bp, Homo sapiens
  misc_feature (61)..(62): /note="This region represents a CpG dinucleotide"
  misc_feature (61)..(61): /note="Nucleotide may be methylated to form 5-methylcytosine"
ctgggacgctggactcaggccctgccttaagaggctcagagtgtggtgaggggaaatagacgaggaaacagatacttatgaggaagaaccatcaaagaggaaggcagtaagctgcttcctgt

SEQ ID NO: 23365 - DNA, 122 bp, Homo sapiens
  misc_feature (61)..(62): /note="This region represents a CpG dinucleotide"
  misc_feature (61)..(61): /note="Nucleotide may be methylated to form 5-methylcytosine"
agaagatgaagactaaggccaagctgcaaatggccaggctatttattgcaaaaatacttccgcaaagaacctatctgcaaatacccacagagggtttttccctcttttgggtgccaattctt

SEQ ID NO: 23366 - DNA, 122 bp, Homo sapiens
  misc_feature (61)..(62): /note="This region represents a CpG dinucleotide"
  misc_feature (61)..(61): /note="Nucleotide may be methylated to form 5-methylcytosine"
tgtgtcaccatgtgcctggctttttctcagccacatgcatttgaggtctgcctgggttgtcgtgtgactcgagagtccattcctctttgtcgctgagaatatttcgttgtgtggatctacca

SEQ ID NO: 23367 - DNA, 122 bp, Homo sapiens
  misc_feature (61)..(62): /note="This region represents a CpG dinucleotide"
  misc_feature (61)..(61): /note="Nucleotide may be methylated to form 5-methylcytosine"
caggctgtggacctgtgggcgtggggcaggggctggccctggggctggcacatgtgctcacgcacctagtcctggggttgcctgtcaattctgcgactgtaattggttttgcttgtctcatt

SEQ ID NO: 23368 - DNA, 122 bp, Homo sapiens
  misc_feature (61)..(62): /note="This region represents a CpG dinucleotide"
  misc_feature (61)..(61): /note="Nucleotide may be methylated to form 5-methylcytosine"
cagggagaagccaaccctccaccagcccaggagagaggcctcaggggaaaccaaccctgacgaccccttgatctcagactcacagccccaaagactgtgaggagaccagtctctgttgttca

SEQ ID NO: 23369 - DNA, 122 bp, Homo sapiens
  misc_feature (61)..(62): /note="This region represents a CpG dinucleotide"
  misc_feature (61)..(61): /note="Nucleotide may be methylated to form 5-methylcytosine"
aactgactgcagccacctttctgagaacacatgtggatgagcagcacagaaaatgttgcccgcaatctatggtaaaccatggctctgggtggcagcacgtgttggagtcagaaggagcaggg

SEQ ID NO: 23370 - DNA, 122 bp, Homo sapiens
  misc_feature (61)..(62): /note="This region represents a CpG dinucleotide"
  misc_feature (61)..(61): /note="Nucleotide may be methylated to form 5-methylcytosine"
cctcccacttcacctgtatactgatgtcaatacagtcaaacagaagagttaaattaacaccggtggctacatgacccaagacatattattgttatttttattactattaccatttaagcttg

SEQ ID NO: 23371 - DNA, 122 bp, Homo sapiens
  misc_feature (61)..(62): /note="This region represents a CpG dinucleotide"
  misc_feature (61)..(61): /note="Nucleotide may be methylated to form 5-methylcytosine"
aactgtgcctgagcatgtttcctatagaaatgggtcaggacaggtggaatcgttggtagccgtgtctgacctaacactatactaagaccagcctccagccccagcccctcaccaacgctaag

SEQ ID NO: 23372 - DNA, 122 bp, Homo sapiens
  misc_feature (61)..(62): /note="This region represents a CpG dinucleotide"
  misc_feature (61)..(61): /note="Nucleotide may be methylated to form 5-methylcytosine"
tcaggacctcacccctccccaaagccctcttcaagccggtgactcacagatgtacaggggcgagttgctgggctctgagaagtcatccacataggagatcccaaatggctgaataggcactg

SEQ ID NO: 23373 - DNA, 122 bp, Homo sapiens
  misc_feature (61)..(62): /note="This region represents a CpG dinucleotide"
  misc_feature (61)..(61): /note="Nucleotide may be methylated to form 5-methylcytosine"
tcacaatcatttagtgactgagagggattgatatcatggctatgaaaaaaaagaaaaaggcgatactggaactttgaaactcagtcttctgactctggggttttgccaagaatcagcagcta

SEQ ID NO: 23374 - DNA, 122 bp, Homo sapiens
  misc_feature (61)..(62): /note="This region represents a CpG dinucleotide"
  misc_feature (61)..(61): /note="Nucleotide may be methylated to form 5-methylcytosine"
tgaggtctaaggggcccaatgcagggctgtagcaagcaggtggtcagggaggctctgctccgtagtctcagccctcttccttcttccagcaccgccgtgtccttcccacaacgtgccgcatt

SEQ ID NO: 23375 - DNA, 122 bp, Homo sapiens
  misc_feature (61)..(62): /note="This region represents a CpG dinucleotide"
  misc_feature (61)..(61): /note="Nucleotide may be methylated to form 5-methylcytosine"
agcccagagacatgccctcccaacgtaaaagccagcactgttgcctcttcccctccaaaccgcttcctcaaagtgtgtacaccttggtaggcttgtcaaacccaactgtaaagatagctggg

SEQ ID NO: 23376 - DNA, 122 bp, Homo sapiens
  misc_feature (61)..(62): /note="This region represents a CpG dinucleotide"
  misc_feature (61)..(61): /note="Nucleotide may be methylated to form 5-methylcytosine"
ggaagagactggaggaattcccactccagccctgctgcctgctggctaaaggacttagtgcgagccatttccccttacccggcttcagttttctcatctataaaatggatgataccgacttc

SEQ ID NO: 23377 - DNA, 122 bp, Homo sapiens
  misc_feature (61)..(62): /note="This region represents a CpG dinucleotide"
  misc_feature (61)..(61): /note="Nucleotide may be methylated to form 5-methylcytosine"
tcaagcgtttgccacagggctgggacacagaaatgctcaatcgatgttggctattattatcgtcagctctcccacagagggctaagggaaggttgcttgtgatgtccatctgaaaatggaca

SEQ ID NO: 23378 - DNA, 122 bp, Homo sapiens
  misc_feature (61)..(62): /note="This region represents a CpG dinucleotide"
  misc_feature (61)..(61): /note="Nucleotide may be methylated to form 5-methylcytosine"
tgttgctctgtgcaaaatgcaaaatgtatgctcaccctgaaaacaactatgcaagaaatacgcatgcacttggacagacaggagagtgagtacacaaagtcaagacaagtgtgtttggaggt

SEQ ID NO: 23379 - DNA, 122 bp, Homo sapiens
  misc_feature (61)..(62): /note="This region represents a CpG dinucleotide"
  misc_feature (61)..(61): /note="Nucleotide may be methylated to form 5-methylcytosine"
tttggcaagatggtcagggcagtttttaaacacctcatgtagctgtccagggttcctgagcgcccaagtattaattcacctcatttttgagcaggattcttccttctgtgaaagcaagagaa

SEQ ID NO: 23380 - DNA, 122 bp, Homo sapiens
  misc_feature (61)..(62): /note="This region represents a CpG dinucleotide"
  misc_feature (61)..(61): /note="Nucleotide may be methylated to form 5-methylcytosine"
agacagtacggctcagatattccagctcacaaacccactgtgcgtgagtcctctctgaaccgatagaaagtgatgcttttttgcatagcgtgtgacacggatgagaaacgagagggtaagta

SEQ ID NO: 23381 - DNA, 122 bp, Homo sapiens
  misc_feature (61)..(62): /note="This region represents a CpG dinucleotide"
  misc_feature (61)..(61): /note="Nucleotide may be methylated to form 5-methylcytosine"
ggggaagccacccgggaggaacctccccacgtgtggccttaggcaaggccctgaccctggcggcaccccatgagtacgtagctcagccaatcatgtcgttcagtgctgtaagctcattcccc

SEQ ID NO: 23382 - DNA, 122 bp, Homo sapiens
  misc_feature (61)..(62): /note="This region represents a CpG dinucleotide"
  misc_feature (61)..(61): /note="Nucleotide may be methylated to form 5-methylcytosine"
cataatgatgccattatgacagatcagcccaaggctgcacactgacctaatcaacaggtgcggcagagctgtgattaagagactgagtcagttcccacttgtgaatagacagcatgaaggct

SEQ ID NO: 23383 - DNA, 122 bp, Homo sapiens
  misc_feature (61)..(62): /note="This region represents a CpG dinucleotide"
  misc_feature (61)..(61): /note="Nucleotide may be methylated to form 5-methylcytosine"
actctgctccatccatactctggactagtaggcagtcattaaagaaatgaggtcatcctgcgtgttccaatctgagaagatgttcagattatatagtgttttctttagggccccagaaggac

SEQ ID NO: 23384 - DNA, 122 bp, Homo sapiens
  misc_feature (61)..(62): /note="This region represents a CpG dinucleotide"
  misc_feature (61)..(61): /note="Nucleotide may be methylated to form 5-methylcytosine"
ccgcaaggggcttgggctgtcaccctgtgggctgagtccagggctgccgtgttggagaggcgtgtgggaatgtgcgttttgggatggcagcccgagcctcctacaacttggcagagttgtca

SEQ ID NO: 23385 - DNA, 122 bp, Homo sapiens
  misc_feature (61)..(62): /note="This region represents a CpG dinucleotide"
  misc_feature (61)..(61): /note="Nucleotide may be methylated to form 5-methylcytosine"
cccactaagtgctcaaatgtccacctgccctaatgaattgtgtaagagtcccagggtttacgctgttcaaagctagggcgtcagtccagctcccagcaccagggggagccagcacagcagag

SEQ ID NO: 23386 - DNA, 122 bp, Homo sapiens
  misc_feature (61)..(62): /note="This region represents a CpG dinucleotide"
  misc_feature (61)..(61): /note="Nucleotide may be methylated to form 5-methylcytosine"
ctgaaggccagaagaggaaggcagatgacagacggaaaaggtaggggacaaggaagtgagcgaaccacgagacaagtgggtgtcatgaactgggaaatcagaagaccagggttggattccaa

SEQ ID NO: 23387 - DNA, 122 bp, Homo sapiens
  misc_feature (61)..(62): /note="This region represents a CpG dinucleotide"
  misc_feature (61)..(61): /note="Nucleotide may be methylated to form 5-methylcytosine"
cccaatggcagttcaaaacccctcctgactctcagaacggtcaggccctcaacctttctacgcaagtcttaatgactaatgctaggcaggtaacattccagatgtctcaccacctagtcccc

SEQ ID NO: 23388 - DNA, 122 bp, Homo sapiens
  misc_feature (61)..(62): /note="This region represents a CpG dinucleotide"
  misc_feature (61)..(61): /note="Nucleotide may be methylated to form 5-methylcytosine"
cttgcccaggccagcaagaccccaccctgacccaaggaaggtcttcaaggatctagctttcgtgccttccactccatttcatgggagcctaactcctcttaaaggatcagtgaagttgtggt

SEQ ID NO: 23389 - DNA, 122 bp, Homo sapiens
  misc_feature (61)..(62): /note="This region represents a CpG dinucleotide"
  misc_feature (61)..(61): /note="Nucleotide may be methylated to form 5-methylcytosine"
tgactggagacagcccagcggaggccacagcctgagaccaagccctggccctggaatcttcggtagctaaagatgtaaatgccaatgtgacaccaggaagggacctcgggatggggaaggga

SEQ ID NO: 23390 - DNA, 122 bp, Homo sapiens
  misc_feature (61)..(62): /note="This region represents a CpG dinucleotide"
  misc_feature (61)..(61): /note="Nucleotide may be methylated to form 5-methylcytosine"
tttcatctctgaggcggctttcttatctctggaagagcagtactatctccctggtggagtcgttctaaaaatgaaaggcaatgtgttcaaagtgcccaacacgtgcctgccgtattcaataa

SEQ ID NO: 23391 - DNA, 122 bp, Homo sapiens
  misc_feature (61)..(62): /note="This region represents a CpG dinucleotide"
  misc_feature (61)..(61): /note="Nucleotide may be methylated to form 5-methylcytosine"
ttgtttgaggtggcatatttgtgtgcagcataatattcagcatctgctttcgctttctctcgggccaggaatgcagcatctagcaaataaacaaaggaaaggtgtcaatccattccctcagc

SEQ ID NO: 23392 - DNA, 122 bp, Homo sapiens
  misc_feature (61)..(62): /note="This region represents a CpG dinucleotide"
  misc_feature (61)..(61): /note="Nucleotide may be methylated to form 5-methylcytosine"
agtggggcaggtgaactgaccagcgtcttcccagctttagtcactgcagtggcaatgaggcgctctccacacccccagttatgtgacaggctagagccctggtgttctctcttcagaacccc

SEQ ID NO: 23393 - DNA, 122 bp, Homo sapiens
  misc_feature (61)..(62): /note="This region represents a CpG dinucleotide"
  misc_feature (61)..(61): /note="Nucleotide may be methylated to form 5-methylcytosine"
gctccctgggagctccacccaggctgccatggggaggggaaggaaggcctttatagtttccggctcacatctcaaggcagtcagtctgggaaatggccttggtcccctgccctaccctggca

SEQ ID NO: 23394 - DNA, 122 bp, Homo sapiens
  misc_feature (61)..(62): /note="This region represents a CpG dinucleotide"
  misc_feature (61)..(61): /note="Nucleotide may be methylated to form 5-methylcytosine"
cctagatgccgggtgcgttccgagttctctacgctgttaaccttggatcttcataacagccggaggagacaagcgctactattttcctttccattttatagatgaggacactgaggcagaga

SEQ ID NO: 23395 - DNA, 122 bp, Homo sapiens
  misc_feature (61)..(62): /note="This region represents a CpG dinucleotide"
  misc_feature (61)..(61): /note="Nucleotide may be methylated to form 5-methylcytosine"
gacagtggagagtcagcagcccaagctcagcactttgggcatgagtcagtcccccacaggcgtgtagacttcatagccctctgaccctcacctggtgctgtagaattccaggatgcagtctg

SEQ ID NO: 23396 - DNA, 122 bp, Homo sapiens
  misc_feature (61)..(62): /note="This region represents a CpG dinucleotide"
  misc_feature (61)..(61): /note="Nucleotide may be methylated to form 5-methylcytosine"
agagattccaagaagcggtgagtgatttcacggcagcagagggttgggacatattacgggcgcggatccctcttggagtgagatgactctccggagagatttagtcgtcaccctcgcgtgtg

SEQ ID NO: 23397 - DNA, 122 bp, Homo sapiens
  misc_feature (61)..(62): /note="This region represents a CpG dinucleotide"
  misc_feature (61)..(61): /note="Nucleotide may be methylated to form 5-methylcytosine"
gttaatgtttacccatgttcttctccggtgccaagagcctttcctgtgggtgcacaactgcgggttccaccatagagattatgcggaacaaatttcagcctgggaatatgattcctgctagg

SEQ ID NO: 23398 - DNA, 122 bp, Homo sapiens
  misc_feature (61)..(62): /note="This region represents a CpG dinucleotide"
  misc_feature (61)..(61): /note="Nucleotide may be methylated to form 5-methylcytosine"
aactggctctgagagtaggtcacagaggtggagtcacaaatgagatctgcacctggtatgcggaaggagactaaaaagagggacatttgccagtaatcacagaaatcaggacaatggggtat

SEQ ID NO: 23399 - DNA, 122 bp, Homo sapiens
  misc_feature (61)..(62): /note="This region represents a CpG dinucleotide"
  misc_feature (61)..(61): /note="Nucleotide may be methylated to form 5-methylcytosine"
gttacatcatcaaatcttataagaccccgtatatgacctcaactactgggcttcaaattacgtataaactcaaggctttgacattctaagacctcaggctatggcagggctacactgccagc

SEQ ID NO: 23400 - DNA, 122 bp, Homo sapiens
  misc_feature (61)..(62): /note="This region represents a CpG dinucleotide"
  misc_feature (61)..(61): /note="Nucleotide may be methylated to form 5-methylcytosine"
tcagaggcattcagactgcaaaactgctgacttcacactgtggacagtgtttcccaaggccgttggaacaagacatcataatgagattcttaccccttgtaatgcctcccttcttcacttga

SEQ ID NO: 23401 - DNA, 122 bp, Homo sapiens
  misc_feature (61)..(62): /note="This region represents a CpG dinucleotide"
  misc_feature (61)..(61): /note="Nucleotide may be methylated to form 5-methylcytosine"
aaacccaacaaaagttcaaacaagtttttaaaactgtatgcagttgcaacattcctcaaacgtactgagtgggtccaggaaagagaaccccgcaaattgccgtctgtcactcctcacaggct

SEQ ID NO: 23402 - DNA, 122 bp, Homo sapiens
  misc_feature (61)..(62): /note="This region represents a CpG dinucleotide"
  misc_feature (61)..(61): /note="Nucleotide may be methylated to form 5-methylcytosine"
tggaggaaaaacgacgctgtcctaatgaaaatcagacattaattagcatagaaatggcaccgcgatgccgctctaatttccctttggttggtttccatggaaatctgtaggtaaagtgtgct

SEQ ID NO: 23403 - DNA, 122 bp, Homo sapiens
  misc_feature (61)..(62): /note="This region represents a CpG dinucleotide"
  misc_feature (61)..(61): /note="Nucleotide may be methylated to form 5-methylcytosine"
aagcaatgcaggcttcctctgctggggcagggaggggctgcttcctcactgttgctggtgcggtgtctggggggagggattccttgttattgctgtatgactgtaagagttccccattaggc

SEQ ID NO: 23404 - DNA, 122 bp, Homo sapiens
  misc_feature (61)..(62): /note="This region represents a CpG dinucleotide"
  misc_feature (61)..(61): /note="Nucleotide may be methylated to form 5-methylcytosine"
cctctctcaaacaacttaaggctttttttttcatttttacaggaagtgtccttcctgctgcgtacaaaaggcagcaatgcagtagagtgggatcagaggggattgggctgcatacaccttgg

SEQ ID NO: 23405 - DNA, 122 bp, Homo sapiens
  misc_feature (61)..(62): /note="This region represents a CpG dinucleotide"
  misc_feature (61)..(61): /note="Nucleotide may be methylated to form 5-methylcytosine"
gtagatgacatcaggattcaggactctgaacacaaacacagtgacactgatcagggttgccgaggtgctgtgtttcggtccagaaagtcactgctgcaggggaggggagtatggtcacagcc

SEQ ID NO: 23406 - DNA, 122 bp, Homo sapiens
  misc_feature (61)..(62): /note="This region represents a CpG dinucleotide"
  misc_feature (61)..(61): /note="Nucleotide may be methylated to form 5-methylcytosine"
ttgacttagaaagagctggccttacaggataccattgcacaaagcctacgagagtttatacgcctaattgctagcatttggaaggtatttttgaatcttgagaatttaattgtacaaaacta

SEQ ID NO: 23407 - DNA, 122 bp, Homo sapiens
  misc_feature (61)..(62): /note="This region represents a CpG dinucleotide"
  misc_feature (61)..(61): /note="Nucleotide may be methylated to form 5-methylcytosine"
aaattcctgaatggttaccagataacttggggacatagggaaagtaggtagctggtgccacggccaaaggtacaggctggttaagggaccacagctactggacacttggaccctgacacgat

SEQ ID NO: 23408 - DNA, 122 bp, Homo sapiens
  misc_feature (61)..(62): /note="This region represents a CpG dinucleotide"
  misc_feature (61)..(61): /note="Nucleotide may be methylated to form 5-methylcytosine"
catctctattctttgaagctggtctgctttgtttacaattatgccctagtcattagccaacggggactttgggagtagcttgttctgggaatacttcctgtcaggtttttcccagcctgtct

SEQ ID NO: 23409 - DNA, 122 bp, Homo sapiens
  misc_feature (61)..(62): /note="This region represents a CpG dinucleotide"
  misc_feature (61)..(61): /note="Nucleotide may be methylated to form 5-methylcytosine"
agttgcttatgtaaagacatcacttcttgttttaaagcctccttttcctgctgagtcactcgtaggtcagatttcatccgggacatttgcaggtttacattctgcacggtgtcttctaaatt

SEQ ID NO: 23410 - DNA, 122 bp, Homo sapiens
  misc_feature (61)..(62): /note="This region represents a CpG dinucleotide"
  misc_feature (61)..(61): /note="Nucleotide may be methylated to form 5-methylcytosine"
tttgtctaaggtctaaccaaatgctgataagcaaattaggtacaactctgagccaggtctcgatgagtccaaagtgtgttttataatatcttgctgtctcttgatcattacaaaatttcatt

SEQ ID NO: 23411 - DNA, 122 bp, Homo sapiens
  misc_feature (61)..(62): /note="This region represents a CpG dinucleotide"
  misc_feature (61)..(61): /note="Nucleotide may be methylated to form 5-methylcytosine"
gcccctatcaacatgtcttgaaggtgtggccactggccgtttgcatcacctttctgtctacgtagcacctgtcagtgacccctgaccccagagcacctgcccttagccttgagaagcctgta

SEQ ID NO: 23412 - DNA, 122 bp, Homo sapiens
  misc_feature (61)..(62): /note="This region represents a CpG dinucleotide"
  misc_feature (61)..(61): /note="Nucleotide may be methylated to form 5-methylcytosine"
cctgaggattagtaaacaaatgtgtgatgtttaatgggagcataacagcctacttccactcgaatgcccagagaagaaaagcagggcagtggtacttccagcctctctcttcaaagaaaaag

SEQ ID NO: 23413 - DNA, 122 bp, Homo sapiens
  misc_feature (61)..(62): /note="This region represents a CpG dinucleotide"
  misc_feature (61)..(61): /note="Nucleotide may be methylated to form 5-methylcytosine"
cgcccgtccctctcagtggcgccgctgagtgaggcggaagggccggcgggtggcgggtggcgggcggcgggcagtggccgggcgctgaggccagaggggcggagcggccgagctgctggggc

SEQ ID NO: 23414 - DNA, 122 bp, Homo sapiens
  misc_feature (61)..(62): /note="This region represents a CpG dinucleotide"
  misc_feature (61)..(61): /note="Nucleotide may be methylated to form 5-methylcytosine"
cagtttcaacatctgtaaacgctgctgatatttccttcctgctacttcagaataaaaatacgtctttaaagtattttgagctctatggagcctgctgtagaaatttagaggtagcatgataa

SEQ ID NO: 23415 - DNA, 122 bp, Homo sapiens
  misc_feature (61)..(62): /note="This region represents a CpG dinucleotide"
  misc_feature (61)..(61): /note="Nucleotide may be methylated to form 5-methylcytosine"
cccagtgccgcatgcttatgtgagtgacatctaatagaactctagaaaccaaagcttggccgagtttccctggtttaccacacttcatgggttatacatcattttgctggcagctttaatca

SEQ ID NO: 23416 - DNA, 122 bp, Homo sapiens
  misc_feature (61)..(62): /note="This region represents a CpG dinucleotide"
  misc_feature (61)..(61): /note="Nucleotide may be methylated to form 5-methylcytosine"
ctcaagtagtactgccatctcagcctcccagagtgtgggggttataggtgtgagccaccacgcctggcctactatgagaaatctgtatggtcagcacattcttgccccatgggcaagcctat

SEQ ID NO: 23417 - DNA, 122 bp, Homo sapiens
  misc_feature (61)..(62): /note="This region represents a CpG dinucleotide"
  misc_feature (61)..(61): /note="Nucleotide may be methylated to form 5-methylcytosine"
gtatgtcactctcactataactttagatctgtaaagcgcaaacaaaactagcaataacaacgataagatctaaactatgcaatctgcttttataagaaaagtaaggtagtcttataatgttt

SEQ ID NO: 23418 - DNA, 122 bp, Homo sapiens
  misc_feature (61)..(62): /note="This region represents a CpG dinucleotide"
  misc_feature (61)..(61): /note="Nucleotide may be methylated to form 5-methylcytosine"
cagagccaccctcctttttaaacagctacttgcctcggcaaagtgcctctatctccccaacgctttccaggtggttaagagtcactcaaaagctgtgtgatcttggccaagttactgaacct

SEQ ID NO: 23419 - DNA, 122 bp, Homo sapiens
  misc_feature (61)..(62): /note="This region represents a CpG dinucleotide"
  misc_feature (61)..(61): /note="Nucleotide may be methylated to form 5-methylcytosine"
ggacaaagcaatgactcacatcctgggcgggatgaagcaggatggcacaagattttattgcgctaccgagaacggtgtgcagcttaaaacttatagtttatttctagaattttccatggaat

SEQ ID NO: 23420 - DNA, 122 bp, Homo sapiens
  misc_feature (61)..(62): /note="This region represents a CpG dinucleotide"
  misc_feature (61)..(61): /note="Nucleotide may be methylated to form 5-methylcytosine"
gttatgctattgacgtcaatggagtcattaaatagattgctggccctcccagaggcaaatcgctgccagggacctagatacagacacgttttttacaaagacaaccatcaggttttgctata

SEQ ID NO: 23421 - DNA, 122 bp, Homo sapiens
  misc_feature (61)..(62): /note="This region represents a CpG dinucleotide"
  misc_feature (61)..(61): /note="Nucleotide may be methylated to form 5-methylcytosine"
gctccattcataaaaattatgttcctgagtctcatgtgtttactcggagagcctccctgacgtacttaggattccaaagtgggaggtaaatatgtgctggaaaattatctattccaaatatc

SEQ ID NO: 23422 - DNA, 122 bp, Homo sapiens
  misc_feature (61)..(62): /note="This region represents a CpG dinucleotide"
  misc_feature (61)..(61): /note="Nucleotide may be methylated to form 5-methylcytosine"
ctgaaaccaaaacaaatgtatggtaaattctcacatacccctctaacatggccaagtttccgctgaacttctgctttttctttcttaagaaattcacacatttccttcaaatctctgacttg

SEQ ID NO: 23423 - DNA, 122 bp, Homo sapiens
  misc_feature (61)..(62): /note="This region represents a CpG dinucleotide"
  misc_feature (61)..(61): /note="Nucleotide may be methylated to form 5-methylcytosine"
tccctttgtgcactctggtagaaaagcagcacattccatttagttatgcctctgtcagcacggcgagtgttatttaattgcagaaaacaatttggagataagagtgagattcaggaaggaaa

SEQ ID NO: 23424 - DNA, 122 bp, Homo sapiens
  misc_feature (61)..(62): /note="This region represents a CpG dinucleotide"
  misc_feature (61)..(61): /note="Nucleotide may be methylated to form 5-methylcytosine"
tttctttcaactctacagcttagtgcctgaaaggcacatattggtctctgtgaatctctacgttaagaatctgatttgcagcactggaaaccttgctagtcttagctctgggctgaatccca

SEQ ID NO: 23425 - DNA, 122 bp, Homo sapiens
  misc_feature (61)..(62): /note="This region represents a CpG dinucleotide"
  misc_feature (61)..(61): /note="Nucleotide may be methylated to form 5-methylcytosine"
gctgatcactgctgcatgaggcagtgtcataaacccctccttgatgctctctggctggagcggccagttgagtgactcatggagcttgtcatctcagggcctccttccctgatgcacacggc

SEQ ID NO: 23426 - DNA, 122 bp, Homo sapiens
  misc_feature (61)..(62): /note="This region represents a CpG dinucleotide"
  misc_feature (61)..(61): /note="Nucleotide may be methylated to form 5-methylcytosine"
taaaaatccaaacagcatttttctccttcttctctttggtcagactgctcaatgcttttacgcttcctcctccgccccctgcttgcgtccatcccccaccccacaccccaccccatgcaaca

SEQ ID NO: 23427 - DNA, 122 bp, Homo sapiens
  misc_feature (61)..(62): /note="This region represents a CpG dinucleotide"
  misc_feature (61)..(61): /note="Nucleotide may be methylated to form 5-methylcytosine"
cccagtggccttttggcaatgtctgaagatatgtttgatgggcacaacttggggaggtggcgtactattgtctcgtagtggcttgcaggggtactgctaaacatcaacacacaggacagctc

SEQ ID NO: 23428 - DNA, 122 bp, Homo sapiens
  misc_feature (61)..(62): /note="This region represents a CpG dinucleotide"
  misc_feature (61)..(61): /note="Nucleotide may be methylated to form 5-methylcytosine"
tggctgaaggaagtcttacgccagggggccagacattcctggcctttgatctgagccccccgtacccacagctccaacctgctgccccttctggtcggcgagccctctccgcacgcggctgc

SEQ ID NO: 23429 - DNA, 122 bp, Homo sapiens
  misc_feature (61)..(62): /note="This region represents a CpG dinucleotide"
  misc_feature (61)..(61): /note="Nucleotide may be methylated to form 5-methylcytosine"
acgggcactagagtcagacaaatggctggttcaagtgctgtctttgtccctcgctgactgcggcatcttggtcaagtttctgatcctgtgagcctcaatgatttcaatggagaaatagaaga

SEQ ID NO: 23430 - DNA, 122 bp, Homo sapiens
  misc_feature (61)..(62): /note="This region represents a CpG dinucleotide"
  misc_feature (61)..(61): /note="Nucleotide may be methylated to form 5-methylcytosine"
aacttgagatgttggcaagaatgaaagtcacccactaccggtttgctctggattgggcctcggtccttcccactggcaacctgtccgcggtgaaccgacaggccctgaggtactacaggtgc

SEQ ID NO: 23431 - DNA, 122 bp, Homo sapiens
  misc_feature (61)..(62): /note="This region represents a CpG dinucleotide"
  misc_feature (61)..(61): /note="Nucleotide may be methylated to form 5-methylcytosine"
tttcctttcagctggctctgggaaccttatgctgatgtaatggagataacctttgtgagacgttaaatcagtgtatttgcctgcccagtaagtctttgtctccatggcttcccccttgagtc

SEQ ID NO: 23432 - DNA, 122 bp, Homo sapiens
  misc_feature (61)..(62): /note="This region represents a CpG dinucleotide"
  misc_feature (61)..(61): /note="Nucleotide may be methylated to form 5-methylcytosine"
ttaattcctgagcacctgagattggccacctcgaggatgaggactggggccagagatgttcggcttggaccacgcccactgctcaaggtcaaggacccagacatcattgctcctgtgaatta

SEQ ID NO: 23433 - DNA, 122 bp, Homo sapiens
  misc_feature (61)..(62): /note="This region represents a CpG dinucleotide"
  misc_feature (61)..(61): /note="Nucleotide may be methylated to form 5-methylcytosine"
actgggtttagagaggctaaataattgacccatgattaatactggtgatgatgatgtttacgactgaatacttattgtatgcccagccctgtactgagtcctttatatacatgatctccatt

SEQ ID NO: 23434 - DNA, 122 bp, Homo sapiens
  misc_feature (61)..(62): /note="This region represents a CpG dinucleotide"
  misc_feature (61)..(61): /note="Nucleotide may be methylated to form 5-methylcytosine"
acccagatagactactcatctattctcgagggcaggtctgacaacctttgtgcaaggtgacgtttcactcctcaccttcccaacacctcccccagagctcagaggaacttttgtcatttact

SEQ ID NO: 23435 - DNA, 122 bp, Homo sapiens
  misc_feature (61)..(62): /note="This region represents a CpG dinucleotide"
  misc_feature (61)..(61): /note="Nucleotide may be methylated to form 5-methylcytosine"
aggcaaatcagactcccttcccacccccaagcccaggaatgtgctccagtcaccctcacccggcgggtcctggtgaaaggagatggacaaaacagggtcacagccaccataggggcctgagc

SEQ ID NO: 23436 - DNA, 122 bp, Homo sapiens
  misc_feature (61)..(62): /note="This region represents a CpG dinucleotide"
  misc_feature (61)..(61): /note="Nucleotide may be methylated to form 5-methylcytosine"
aggacacccgccctggctgggagtcgaggccgagtttgcatccaaagctgtagcacagtgcggcccacagcaaagggcatcctcaggaagcaaggtgcttgtgtttgtgccttcgtccttta

SEQ ID NO: 23437 - DNA, 122 bp, Homo sapiens
  misc_feature (61)..(62): /note="This region represents a CpG dinucleotide"
  misc_feature (61)..(61): /note="Nucleotide may be methylated to form 5-methylcytosine"
gggccatctgcctctcctcattgtgagtgctgtctcacactcgttgttgttcgtaatggtcgtctttcagtttttattttgtatgtatgtatttatttatattttgcagacagggccttgct

SEQ ID NO: 23438 - DNA, 122 bp, Homo sapiens
  misc_feature (61)..(62): /note="This region represents a CpG dinucleotide"
  misc_feature (61)..(61): /note="Nucleotide may be methylated to form 5-methylcytosine"
attagtttcagtgacccgttctccaagccttggtcataaaggatgaatgttcaagagcagcgactcattgtaatagagaaaggatctgtgctgcctgccaccaggcctagacttctgcattc

SEQ ID NO: 23439 - DNA, 122 bp, Homo sapiens
  misc_feature (61)..(62): /note="This region represents a CpG dinucleotide"
  misc_feature (61)..(61): /note="Nucleotide may be methylated to form 5-methylcytosine"
cctcactggtctctcaaagccctgcttgatctggctgaaacataccctcccatcagatagcgggtggaggtgctgtcagattaatcttcatgaagctcagctctgaccgtgtatttccctta

SEQ ID NO: 23440 - DNA, 122 bp, Homo sapiens
  misc_feature (61)..(62): /note="This region represents a CpG dinucleotide"
  misc_feature (61)..(61): /note="Nucleotide may be methylated to form 5-methylcytosine"
ttaaggctcggtttggcctctgtaggcagccgaggtccccatcccccgataggtcacagccgcgatgctcaaatcgcacactatagcccacaggcagcttacctgttttttttaaaaaaaaa

SEQ ID NO: 23441 - DNA, 122 bp, Homo sapiens
  misc_feature (61)..(62): /note="This region represents a CpG dinucleotide"
  misc_feature (61)..(61): /note="Nucleotide may be methylated to form 5-methylcytosine"
tgctccagaatttaattcaagaaattcaccagagagtcagaattatctggaaacacaatacgggatcctaactggctcattaatcaagttcctagaaaataactgattaatccatctgtcac

SEQ ID NO: 23442 - DNA, 122 bp, Homo sapiens
  misc_feature (61)..(62): /note="This region represents a CpG dinucleotide"
  misc_feature (61)..(61): /note="Nucleotide may be methylated to form 5-methylcytosine"
agtacaaggcagtctcctgttgggagtgttatagcaggaagtaggatacagcgtttttggcgtggtagtcacagggtgaaggaagtaggaaaaggatattacataacacatcacagttttga

SEQ ID NO: 23443 - DNA, 122 bp, Homo sapiens
  misc_feature (61)..(62): /note="This region represents a CpG dinucleotide"
  misc_feature (61)..(61): /note="Nucleotide may be methylated to form 5-methylcytosine"
tggttccctcatcaggaagacattgctcttggcttggctgtcaccagttgggagaatttccgcaaccctaagcagcagcctatgtgttttaggcaggatgtgggttttagtctttctattta

SEQ ID NO: 23444 - DNA, 122 bp, Homo sapiens
  misc_feature (61)..(62): /note="This region represents a CpG dinucleotide"
  misc_feature (61)..(61): /note="Nucleotide may be methylated to form 5-methylcytosine"
tttactctgcataatcaccacccgtgaggtagctacttttgttagcttcatttacatatacggaaatgtcattctgaaagggtaactgaccctactaataaatggcagaaccaggattacct

SEQ ID NO: 23445 - DNA, 122 bp, Homo sapiens
  misc_feature (61)..(62): /note="This region represents a CpG dinucleotide"
  misc_feature (61)..(61): /note="Nucleotide may be methylated to form 5-methylcytosine"
gaaactctgatcccaaatgatggtattgcggggtgcggccttagggaggtgattaggtcacgaaggcagagccttcatgggtgggattaatgcccttataagaacagtaagagataaatgtt

SEQ ID NO: 23446 - DNA, 122 bp, Homo sapiens
  misc_feature (61)..(62): /note="This region represents a CpG dinucleotide"
  misc_feature (61)..(61): /note="Nucleotide may be methylated to form 5-methylcytosine"
cctgctacatgcctctgataagctggaactctgagatgacatgagagcacgagccagagacggctatccctgttctgttatgaaccccactttatatcaaggcaatttaagtacaggaaggg

SEQ ID NO: 23447 - DNA, 122 bp, Homo sapiens
  misc_feature (61)..(62): /note="This region represents a CpG dinucleotide"
  misc_feature (61)..(61): /note="Nucleotide may be methylated to form 5-methylcytosine"
gccccaccctgactcaccgggggcagtgctgacagctggttccggtcaagccacagctcccgaagattgggcagagcccccagagtgtctggctgcaagaaggaacagagaaaatagtgact

SEQ ID NO: 23448 - DNA, 122 bp, Homo sapiens
  misc_feature (61)..(62): /note="This region represents a CpG dinucleotide"
  misc_feature (61)..(61): /note="Nucleotide may be methylated to form 5-methylcytosine"
tctacctggccagttttcttaaaggctctctcaggacatctcctagcgcaaagctcacagcgtgaagtactattgtagacaataggggctgggcaccacagctcatgcctgtaatcccagca

SEQ ID NO: 23449 - DNA, 122 bp, Homo sapiens
  misc_feature (61)..(62): /note="This region represents a CpG dinucleotide"
  misc_feature (61)..(61): /note="Nucleotide may be methylated to form 5-methylcytosine"
tgggagaaaaaaataaacccctgttgatttaagtcaccatcagttcgattttctgttaatcgtgcagattttttttttttttttttttttttttactcaatgtcaggccaacctaaatagat

SEQ ID NO: 23450 - DNA, 122 bp, Homo sapiens
  misc_feature (61)..(62): /note="This region represents a CpG dinucleotide"
  misc_feature (61)..(61): /note="Nucleotide may be methylated to form 5-methylcytosine"
tagctggcgaatgtgataaacaggctgaatcctaactttctgttggctgccctgattctgcgctgactcagctttctttgtggcttcctgccaatgcatgtaaggtaccatccaaagtctgg

SEQ ID NO: 23451 - DNA, 122 bp, Homo sapiens
  misc_feature (61)..(62): /note="This region represents a CpG dinucleotide"
  misc_feature (61)..(61): /note="Nucleotide may be methylated to form 5-methylcytosine"
gggagcaggaaggaaagaaggtcaagccaggcctgctccctgccactccaagcttgagcacgccaaagcctgggacctccaccagaagctaatcaaaacgagaagaccccaccccattcgac

SEQ ID NO: 23452 - DNA, 122 bp, Homo sapiens
  misc_feature (61)..(62): /note="This region represents a CpG dinucleotide"
  misc_feature (61)..(61): /note="Nucleotide may be methylated to form 5-methylcytosine"
ggcgtgggtggcgtgcagcaggccgtgtgctgctgggcgtgggtggcgcgctacaggcttcgtgctgctgggcctgggtggcgtgctacgggcttgtgctgctgggtgtgggtggcgcgcta

SEQ ID NO: 23453 - DNA, 122 bp, Homo sapiens
  misc_feature (61)..(62): /note="This region represents a CpG dinucleotide"
  misc_feature (61)..(61): /note="Nucleotide may be methylated to form 5-methylcytosine"
ggccaagaggaaattctgcagttgagcactgtgcctctgaggtcctgtcttgctctttagcggatatagcatacacaggaagtgcattggttaggtaaagtcaatttcctcttcagaaagaa

SEQ ID NO: 23454 - DNA, 122 bp, Homo sapiens
  misc_feature (61)..(62): /note="This region represents a CpG dinucleotide"
  misc_feature (61)..(61): /note="Nucleotide may be methylated to form 5-methylcytosine"
taatcatagactgtttgaggttgatttggtctaagcgagggacaattttgaggattcaaacgacaaaaagaaggcagaagagttatctcttgagactgctctccggagacctgcccttgctt

SEQ ID NO: 23455 - DNA, 122 bp, Homo sapiens
  misc_feature (61)..(62): /note="This region represents a CpG dinucleotide"
  misc_feature (61)..(61): /note="Nucleotide may be methylated to form 5-methylcytosine"
cagccagttttgaagtttgtcaacacacccacattcttgggacgtgaatgactcttatcacgctgcttctcatgggcattatttgtggtgaggaaacttcccaggaatatttcagtaatgac

SEQ ID NO: 23456 - DNA, 122 bp, Homo sapiens
  misc_feature (61)..(62): /note="This region represents a CpG dinucleotide"
  misc_feature (61)..(61): /note="Nucleotide may be methylated to form 5-methylcytosine"
gctgaatggattttttttttaactcgaggcagatgcagatacaatagtctatgggcaaagcgattttgatttgcaagagctagagcttaagagagaaacagtttagctttaaattccaagaa

SEQ ID NO: 23457 - DNA, 122 bp, Homo sapiens
  misc_feature (61)..(62): /note="This region represents a CpG dinucleotide"
  misc_feature (61)..(61): /note="Nucleotide may be methylated to form 5-methylcytosine"
aagtacagggtggccacctgtttcagagaccccaccagatctgacatacatacaccattacgtaagttataaagagcatatagagataataaccaagtgaattgggaggcaatggctccctt

SEQ ID NO: 23458 - DNA, 122 bp, Homo sapiens
  misc_feature (61)..(62): /note="This region represents a CpG dinucleotide"
  misc_feature (61)..(61): /note="Nucleotide may be methylated to form 5-methylcytosine"
aagttgagaaggaacaaagaccgtagtgtgtggttgctttgcatcctcccacctgaactacgtgctcatcacagtggaatttcattgcaacttctctcagtctggtgagcattgtgtctggt

SEQ ID NO: 23459 - DNA, 122 bp, Homo sapiens
  misc_feature (61)..(62): /note="This region represents a CpG dinucleotide"
  misc_feature (61)..(61): /note="Nucleotide may be methylated to form 5-methylcytosine"
acttaggaaaggctaattagtgacagtgatgttctgagtaggctgccaagcaagaggcttcgtgatggcagccagatggggcaactgagcagacagcacaggcctctggagggcagtgccaa

SEQ ID NO: 23460 - DNA, 122 bp, Homo sapiens
  misc_feature (61)..(62): /note="This region represents a CpG dinucleotide"
  misc_feature (61)..(61): /note="Nucleotide may be methylated to form 5-methylcytosine"
attcactacttttagaccaaccaagaagaagaatagttttgaccagaattggaatttgaacgctcccccaagttgagtatgtctgtgtgctagtggagtggggaagggttgagtcacaatcc

SEQ ID NO: 23461 - DNA, 122 bp, Homo sapiens
  misc_feature (61)..(62): /note="This region represents a CpG dinucleotide"
  misc_feature (61)..(61): /note="Nucleotide may be methylated to form 5-methylcytosine"
ctttgtgcaaagccctgaagatttcccaaaaggaatcagacagtctctgccctctagaaccgtggttgtaggagaagagataaacacaaaacaccacctaaaatatggcaagatgaagtggg

SEQ ID NO: 23462 - DNA, 122 bp, Homo sapiens
  misc_feature (61)..(62): /note="This region represents a CpG dinucleotide"
  misc_feature (61)..(61): /note="Nucleotide may be methylated to form 5-methylcytosine"
aaatgaaggtcagaaattaaatcaaatagcaacactagagaaatagctcaaaaaaaaaaacgccaaaagatgaggtttccaagtaaaaaattatcaaagcacaagtgtaaaaagtaaagtag

SEQ ID NO: 23463 - DNA, 122 bp, Homo sapiens
  misc_feature (61)..(62): /note="This region represents a CpG dinucleotide"
  misc_feature (61)..(61): /note="Nucleotide may be methylated to form 5-methylcytosine"
ttgtcccatatgattataatagaactaaaaaattcctattgcctaatgtcatggctgtagcgtcacagtgaaaagcattactcacatttgtggtgatgtggtataaacaaaccactgcaagt

SEQ ID NO: 23464 - DNA, 122 bp, Homo sapiens
  misc_feature (61)..(62): /note="This region represents a CpG dinucleotide"
  misc_feature (61)..(61): /note="Nucleotide may be methylated to form 5-methylcytosine"
ctcctcagttttgtggagcctgatctcttttccaaggaagaggtgggagattttattcaacgctaccaggatattgagaaagaatctgagtcaggcaagttcctttcctgcaaatcatcccc

SEQ ID NO: 23465 - DNA, 122 bp, Homo sapiens
  misc_feature (61)..(62): /note="This region represents a CpG dinucleotide"
  misc_feature (61)..(61): /note="Nucleotide may be methylated to form 5-methylcytosine"
cccagagtcctttctcaccctccctgcctggcaagtcaactaatgtgcacaaaggaggcacgaaatgtgcatggcttcagtctgagtctgttgagacaggtcacttgtagccaggatgatgc

SEQ ID NO: 23466 - DNA, 122 bp, Homo sapiens
  misc_feature (61)..(62): /note="This region represents a CpG dinucleotide"
  misc_feature (61)..(61): /note="Nucleotide may be methylated to form 5-methylcytosine"
ctatgaccccaggcttcgagaaaagactccaccaagttccatgagcacctgtaggagagccggcctctgggtagatttcacccaaagaagctaaaacgctcacgtggtgcttatgggatcac

SEQ ID NO: 23467 - DNA, 122 bp, Homo sapiens
  misc_feature (61)..(62): /note="This region represents a CpG dinucleotide"
  misc_feature (61)..(61): /note="Nucleotide may be methylated to form 5-methylcytosine"
tcaaagtacagtttctactgtgtgtcacttttgcaccatcatacagtcaaaacactgttacgctggggcatcctaagtcagcaaccacctgtgtatatgctcttgtggtttaacggcagcac

SEQ ID NO: 23468 - DNA, 122 bp, Homo sapiens
  misc_feature (61)..(62): /note="This region represents a CpG dinucleotide"
  misc_feature (61)..(61): /note="Nucleotide may be methylated to form 5-methylcytosine"
gcatggcatgcccctcattttctactgtctagaactcagtcatatggcaccatcacactccgagggtgactagggggaagaagtccagcttgctccaggaagaatagaagtcagctttgatg

SEQ ID NO: 23469 - DNA, 122 bp, Homo sapiens
  misc_feature (61)..(62): /note="This region represents a CpG dinucleotide"
  misc_feature (61)..(61): /note="Nucleotide may be methylated to form 5-methylcytosine"
cagcccagtctacttgagggctcggtgatggctgcttctttgtatgtgcctgacacagaccgggcagttaaacaaatgtttgttgaatgaatatgttcctggatgagtgagagtggcagaaa

SEQ ID NO: 23470 - DNA, 122 bp, Homo sapiens
  misc_feature (61)..(62): /note="This region represents a CpG dinucleotide"
  misc_feature (61)..(61): /note="Nucleotide may be methylated to form 5-methylcytosine"
ataaaatgaaaccttttgcttcaggtgagggcatcttatttccctgaatgagaatctagacgattcatgttgtgaccaacagagaaaagcctgtgcaagaatggagtcaacccaaagaaagc

SEQ ID NO: 23471 - DNA, 122 bp, Homo sapiens
  misc_feature (61)..(62): /note="This region represents a CpG dinucleotide"
  misc_feature (61)..(61): /note="Nucleotide may be methylated to form 5-methylcytosine"
aggagaagtcggccccctgcactgctgtggatgaggtggaggactggagatttgctcatgcgtggagctgacgccaaagcctgtgtgttcaccattgggccacccagcctgttgggcaggac

SEQ ID NO: 23472 - DNA, 122 bp, Homo sapiens
  misc_feature (61)..(62): /note="This region represents a CpG dinucleotide"
  misc_feature (61)..(61): /note="Nucleotide may be methylated to form 5-methylcytosine"
gacttccctgctctggatgtactggattctgctgattttcttgccctgcaagcttatcttcgcctgcagggagtttttcctgttcctctgaaggaacagccttccccaggtcaacaagtggt

SEQ ID NO: 23473 - DNA, 122 bp, Homo sapiens
  misc_feature (61)..(62): /note="This region represents a CpG dinucleotide"
  misc_feature (61)..(61): /note="Nucleotide may be methylated to form 5-methylcytosine"
gaaacaagagaagcggagctttgtgcttgcctaaagacgtacccacaactacatagataacggagagttatgcagatagctttacagataagatactcaaacagctacagagatgaaaggag

SEQ ID NO: 23474 - DNA, 122 bp, Homo sapiens
  misc_feature (61)..(62): /note="This region represents a CpG dinucleotide"
  misc_feature (61)..(61): /note="Nucleotide may be methylated to form 5-methylcytosine"
agtgtgtcactttattgccaaaagaagacacaaacgatggagtacaatggtaggagtctccggctgggttctcagggattttctcaggaattatgttttgctccaagtcgtttcagttgacg

SEQ ID NO: 23475 - DNA, 122 bp, Homo sapiens
  misc_feature (61)..(62): /note="This region represents a CpG dinucleotide"
  misc_feature (61)..(61): /note="Nucleotide may be methylated to form 5-methylcytosine"
agcaagtgcaacgggcaagagcaagcttaggagtaaacccacggaccgtcgggggtggctcggcgtgctctgcaggtgagctggtgaagaagtgtttgtcacggcctgtgcacagctgtaca

SEQ ID NO: 23476 - DNA, 122 bp, Homo sapiens
  misc_feature (61)..(62): /note="This region represents a CpG dinucleotide"
  misc_feature (61)..(61): /note="Nucleotide may be methylated to form 5-methylcytosine"
aggagagcaagaatttctcctgacttcctgccaagctttcagggaccttggagtggtcagcgctatctgccccaacacgaactggagccagattgtgcattctcgactgctcatctgctttc

SEQ ID NO: 23477 - DNA, 122 bp, Homo sapiens
  misc_feature (61)..(62): /note="This region represents a CpG dinucleotide"
  misc_feature (61)..(61): /note="Nucleotide may be methylated to form 5-methylcytosine"
acattttatatgctacctgcccactagtcacttaatagctgtcttggttatcagattgaccgtcactgtattgcagtgcttgtgtttaaccctcattttacttaataatggccctaaagtgc

SEQ ID NO: 23478 - DNA, 122 bp, Homo sapiens
  misc_feature (61)..(62): /note="This region represents a CpG dinucleotide"
  misc_feature (61)..(61): /note="Nucleotide may be methylated to form 5-methylcytosine"
aggcttaccttcttgaaatagtcagcaaggctgtcggggtcccagcccaggacctctgagcgaaagggcacattcctcagtgccatggctgctctcccgggaagaagctcacaagctgagca

SEQ ID NO: 23479 - DNA, 122 bp, Homo sapiens
  misc_feature (61)..(62): /note="This region represents a CpG dinucleotide"
  misc_feature (61)..(61): /note="Nucleotide may be methylated to form 5-methylcytosine"
ctcacagccctatgcactctagtttctgtttaccaggcacatgggccaatacccttgtttcgaaaacaggaagagcattgctgtgaatgagaagtcagtggggactttggaaggaaactaat

SEQ ID NO: 23480 - DNA, 122 bp, Homo sapiens
  misc_feature (61)..(62): /note="This region represents a CpG dinucleotide"
  misc_feature (61)..(61): /note="Nucleotide may be methylated to form 5-methylcytosine"
gctttgtcacccaggctggggtgagtggcctcattgcagctgactgcagcctcaatttctcgtgcccaagccatccaaagttctttgttctattatgtggacagacacgaagggcatggcat

SEQ ID NO: 23481 - DNA, 122 bp, Homo sapiens
  misc_feature (61)..(62): /note="This region represents a CpG dinucleotide"
  misc_feature (61)..(61): /note="Nucleotide may be methylated to form 5-methylcytosine"
accggggaacaagcatttcaaacacgtacttgctgcagactctgccctctggaatggctgcgatcctgtctcaaatggatttgagcagaaaaggggaagtgactggcagaaaagcccagaga

SEQ ID NO: 23482 - DNA, 122 bp, Homo sapiens
  misc_feature (61)..(62): /note="This region represents a CpG dinucleotide"
  misc_feature (61)..(61): /note="Nucleotide may be methylated to form 5-methylcytosine"
aatatctatagctgccgctgccaatactaggactagggctgttggctggggctccaattccgcaaactgatcagatcagagtcctgtgtacatacacaccgagtatataagcgggtcctctt

SEQ ID NO: 23483 - DNA, 122 bp, Homo sapiens
  misc_feature (61)..(62): /note="This region represents a CpG dinucleotide"
  misc_feature (61)..(61): /note="Nucleotide may be methylated to form 5-methylcytosine"
aatgtttagcatgtgtgtaaaggtcgtaggtctggtgttcagaaattacatacaggcttacgaaagaatctgcactgggttggccaaattaaacaacaggcagttgtagagaaataaacaca

SEQ ID NO: 23484 - DNA, 122 bp, Homo sapiens
  misc_feature (61)..(62): /note="This region represents a CpG dinucleotide"
  misc_feature (61)..(61): /note="Nucleotide may be methylated to form 5-methylcytosine"
gagcagtggggcccgggttctgcccgcctcttcctctgactgtttcctcatctggggtcacgggataagtgcagctccgcctccctggtcatgcaggtgactgtgaatgaaagtgtcttgga

SEQ ID NO: 23485 - DNA, 122 bp, Homo sapiens
  misc_feature (61)..(62): /note="This region represents a CpG dinucleotide"
  misc_feature (61)..(61): /note="Nucleotide may be methylated to form 5-methylcytosine"
ttaggaaaattatgaagcttcagatttccttcccatttgtttacaaagaatatatgaatgcgataggattatgccgaacctggggaagagttgtattactcagaatgattcactgactcctt

SEQ ID NO: 23486 - DNA, 122 bp, Homo sapiens
  misc_feature (61)..(62): /note="This region represents a CpG dinucleotide"
  misc_feature (61)..(61): /note="Nucleotide may be methylated to form 5-methylcytosine"
aaggaggcaggaaatccttccagctaaccaacttttacattctgttccttatggtcaaaacgttgaccacactgtggtagctctttttgactttatgaccttattactaagaccatcaatta

SEQ ID NO: 23487 - DNA, 122 bp, Homo sapiens
  misc_feature (61)..(62): /note="This region represents a CpG dinucleotide"
  misc_feature (61)..(61): /note="Nucleotide may be methylated to form 5-methylcytosine"
tggatatttggcaatggtcccataagattataacagaactgaaaaattcctatcacctagcgacattgtagtaaacgtaaagttgtagagcaacaccactcgtgtttgtggctacataggtg

SEQ ID NO: 23488 - DNA, 122 bp, Homo sapiens
  misc_feature (61)..(62): /note="This region represents a CpG dinucleotide"
  misc_feature (61)..(61): /note="Nucleotide may be methylated to form 5-methylcytosine"
agccagagagtggcctctgtcattgctcattcagttcctgagtcaggccttattgggcaacgtggttgaatttcatgactgtgtttcctaaactgaacaatctagttagcatgcacctcctc

SEQ ID NO: 23489 - DNA, 122 bp, Homo sapiens
  misc_feature (61)..(62): /note="This region represents a CpG dinucleotide"
  misc_feature (61)..(61): /note="Nucleotide may be methylated to form 5-methylcytosine"
gctgagtcagttcctgagtgggggccacagaactagttggcaggtccaggtggggtcattcggttgttagaaatggaaaaaccttatttattagggttctctatagggacagaactttatat

SEQ ID NO: 23490 - DNA, 122 bp, Homo sapiens
  misc_feature (61)..(62): /note="This region represents a CpG dinucleotide"
  misc_feature (61)..(61): /note="Nucleotide may be methylated to form 5-methylcytosine"
aatgagaatggaagatttcatttggaaatggccctgtgagtacgtgcttattttcagaggcgttccccataactgacagcagtcaatgacttctgattgggcaatggcctggccagccacac

SEQ ID NO: 23491 - DNA, 122 bp, Homo sapiens
  misc_feature (61)..(62): /note="This region represents a CpG dinucleotide"
  misc_feature (61)..(61): /note="Nucleotide may be methylated to form 5-methylcytosine"
ctcagagaaaaagttccctcttttggaggggctttgggggggcaaggcctaggaaaaaggcgagcgcagaggaaaaaaaatctatcatagaatatcgctgctagggtgttttttttctaatt

SEQ ID NO: 23492 - DNA, 122 bp, Homo sapiens
  misc_feature (61)..(62): /note="This region represents a CpG dinucleotide"
  misc_feature (61)..(61): /note="Nucleotide may be methylated to form 5-methylcytosine"
acactgggtggcatagctggccctaaaacccaaattcttttcctggaacaacttacttcccgtctttccacttcagagagggggaacctaggatcaatgaagttgatgggttttcgtctgct

SEQ ID NO: 23493 - DNA, 122 bp, Homo sapiens
  misc_feature (61)..(62): /note="This region represents a CpG dinucleotide"
  misc_feature (61)..(61): /note="Nucleotide may be methylated to form 5-methylcytosine"
acttcaacttgctacacacttctatgtgttttctaagcaaccaccaattcagagtttccccgcaacaaaaggaaatagtcttctctggggggaggggaccatttttggtaggggagaaggga

SEQ ID NO: 23494 - DNA, 122 bp, Homo sapiens
  misc_feature (61)..(62): /note="This region represents a CpG dinucleotide"
  misc_feature (61)..(61): /note="Nucleotide may be methylated to form 5-methylcytosine"
tatctagaattgagaaaaaaattaagactatattcaacaggatgtaaatactaagtttgacgtaaacttcctgagaagtggaggtttgctcggaaacttcctgcttggtcataacagagagc

SEQ ID NO: 23495 - DNA, 122 bp, Homo sapiens
  misc_feature (61)..(62): /note="This region represents a CpG dinucleotide"
  misc_feature (61)..(61): /note="Nucleotide may be methylated to form 5-methylcytosine"
tatacaaatcttctggctgacatacatactaaactaccttaaaaagtgatttccaccaggcgcagtggctcacacctgtaatcccagcactttgggaagctgagacggatcacgaggtcagg

SEQ ID NO: 23496 - DNA, 122 bp, Homo sapiens
  misc_feature (61)..(62): /note="This region represents a CpG dinucleotide"
  misc_feature (61)..(61): /note="Nucleotide may be methylated to form 5-methylcytosine"
ccccttgggctttgtacaaggtctcacaatgccccctgacttgggtcttggttctactgacgcactgtggcagttttgtctaaggtacatgtgggaatccaccctcctggcaatgtgctggg

SEQ ID NO: 23497 - DNA, 122 bp, Homo sapiens
  misc_feature (61)..(62): /note="This region represents a CpG dinucleotide"
  misc_feature (61)..(61): /note="Nucleotide may be methylated to form 5-methylcytosine"
tcctattctccttcttcccattgattatgggtgtggctgaaccactcagaaattcatcaccggtaaccaagtgagttcaatggtctttgaatgggttgcaggctgtgggtgtggtgtggtgg

SEQ ID NO: 23498 - DNA, 122 bp, Homo sapiens
  misc_feature (61)..(62): /note="This region represents a CpG dinucleotide"
  misc_feature (61)..(61): /note="Nucleotide may be methylated to form 5-methylcytosine"
ccttgacatgagcaacatgatattgcaacagttgatcctaaatgactcacagacagggcgcgtagccagcgtggatctgccggacaaagggagccaggtcctgtgagggatggagtgagatt

SEQ ID NO: 23499 - DNA, 122 bp, Homo sapiens
  misc_feature (61)..(62): /note="This region represents a CpG dinucleotide"
  misc_feature (61)..(61): /note="Nucleotide may be methylated to form 5-methylcytosine"
tttaggagtcatgaggctgagaacctcttcacagggcctgctgccccacccagggggaaacggaactgcctaaaatgggctggtccagtaatgtcccatccaaaatgcaaatttatccataa

SEQ ID NO: 23500 - DNA, 122 bp, Homo sapiens
  misc_feature (61)..(62): /note="This region represents a CpG dinucleotide"
  misc_feature (61)..(61): /note="Nucleotide may be methylated to form 5-methylcytosine"
ctaagttttcttctagggtgtttatggatttagtctaacatttgtggatgaatgagtcttcgtgtagcattttaaggaggggagatgtacagactcattacagatgaacctgtttgctaagc

SEQ ID NO: 23501 - DNA, 122 bp, Homo sapiens
  misc_feature (61)..(62): /note="This region represents a CpG dinucleotide"
  misc_feature (61)..(61): /note="Nucleotide may be methylated to form 5-methylcytosine"
cttccggatctcaccacccacttctttcttaatcggcacaatctggatccgccctcagcacgtcacagtccgtggatcctctgagaactcctgtgacctcctattgctgctggattgcaggc

SEQ ID NO: 23502 - DNA, 122 bp, Homo sapiens
  misc_feature (61)..(62): /note="This region represents a CpG dinucleotide"
  misc_feature (61)..(61): /note="Nucleotide may be methylated to form 5-methylcytosine"
actcctcaactgtcaccttgatccagccagtgtcaacactgggctccctgctccccgcctcgcccctggctattctcatcagccaggcagccagggggtcctgttcaaacccaaagcagctc

SEQ ID NO: 23503 - DNA, 122 bp, Homo sapiens
  misc_feature (61)..(62): /note="This region represents a CpG dinucleotide"
  misc_feature (61)..(61): /note="Nucleotide may be methylated to form 5-methylcytosine"
gctgctgggtctgtgtgggtaggccggcaggatttatttcaggtgacggaggaacatacacggaatatgaatttccgcaggagtggcgccgtgattccttccctctccctctcggccgccct

SEQ ID NO: 23504 - DNA, 122 bp, Homo sapiens
  misc_feature (61)..(62): /note="This region represents a CpG dinucleotide"
  misc_feature (61)..(61): /note="Nucleotide may be methylated to form 5-methylcytosine"
agagctgttccaaatgacctgaagatctgtgagaacaaatgtctgttgtttaaagccaaacgattttgggcgtggtttgttatgtagcatttttgtggaaatacctgcttgagttttctttt

SEQ ID NO: 23505 - DNA, 122 bp, Homo sapiens
  misc_feature (61)..(62): /note="This region represents a CpG dinucleotide"
  misc_feature (61)..(61): /note="Nucleotide may be methylated to form 5-methylcytosine"
tttatgatccttgtcaaaaggtgttcggccggctctaattatccaggtttcagctgccaccgcttccatctcagcacagcatctctgccctggaagatgtcaaacaagattgctgttgtcag

SEQ ID NO: 23506 - DNA, 122 bp, Homo sapiens
  misc_feature (61)..(62): /note="This region represents a CpG dinucleotide"
  misc_feature (61)..(61): /note="Nucleotide may be methylated to form 5-methylcytosine"
cctgagtcatcgttcccctcctgtgccacctccttacaacaaactcgggcacagcacagacgaggatgtgattattgtgtgaagtgaatctgtaagatgagctatgtgtccaatgacttcag

SEQ ID NO: 23507 - DNA, 122 bp, Homo sapiens
  misc_feature (61)..(62): /note="This region represents a CpG dinucleotide"
  misc_feature (61)..(61): /note="Nucleotide may be methylated to form 5-methylcytosine"
aaatagtactttggcagaaccctgcatcccatgagatgtctgggccacccagaacagtcacgtcccctgagcctgagctgaaacagcacatcacccttggggaattgttgcactggccaagc

SEQ ID NO: 23508 - DNA, 122 bp, Homo sapiens
  misc_feature (61)..(62): /note="This region represents a CpG dinucleotide"
  misc_feature (61)..(61): /note="Nucleotide may be methylated to form 5-methylcytosine"
ctccactcactcaggagctcccaggcaggtgctggggcctggcgcggcacagcggctgtccgtgtgtccccagacaggcaaggcaggacaggggtcctggaaaggctgcagggaggggtcct

SEQ ID NO: 23509 - DNA, 122 bp, Homo sapiens
  misc_feature (61)..(62): /note="This region represents a CpG dinucleotide"
  misc_feature (61)..(61): /note="Nucleotide may be methylated to form 5-methylcytosine"
ttcctgtacatttggggatgtcagaaccgtctgtttcctcatctacacgtggttagatgccgacaacaatctcttctcttaaaattgcttactattagaccagcagagtgtttggtattaat

SEQ ID NO: 23510 - DNA, 122 bp, Homo sapiens
  misc_feature (61)..(62): /note="This region represents a CpG dinucleotide"
  misc_feature (61)..(61): /note="Nucleotide may be methylated to form 5-methylcytosine"
agagaagagtcacattgagtaaaataaaagactgcagtttgtgggaagaattatttttcacggtgctactaatcctgctgtatcccgggtttttaatataaaggtgttaagcttattttgct

SEQ ID NO: 23511 - DNA, 122 bp, Homo sapiens
  misc_feature (61)..(62): /note="This region represents a CpG dinucleotide"
  misc_feature (61)..(61): /note="Nucleotide may be methylated to form 5-methylcytosine"
tgttcctctgccacatgcacattgctttatacatgaggaaactaagccccagaaaactcgcgggactagtctggtgtcacacatccagctagaactagaaattgtatattgctgccttctcc

SEQ ID NO: 23512 - DNA, 122 bp, Homo sapiens
  misc_feature (61)..(62): /note="This region represents a CpG dinucleotide"
  misc_feature (61)..(61): /note="Nucleotide may be methylated to form 5-methylcytosine"
gtgagctcgtgcttggctctgagtcactattgtctgtaaaaagtataattgccctgcttacgctgtacatacagcttgctcacacccagtgagagagtaaagccatgttgaaactgtctgcg

SEQ ID NO: 23513 - DNA, 122 bp, Homo sapiens
  misc_feature (61)..(62): /note="This region represents a CpG dinucleotide"
  misc_feature (61)..(61): /note="Nucleotide may be methylated to form 5-methylcytosine"
agtccttgtgttttctccttcctgtgaatgctacacccattaccaaccactggatggtctcgggttaaatagcacttcctcagagaaggcttctttgaactcagactagcacagaacctaca

SEQ ID NO: 23514 - DNA, 122 bp, Homo sapiens
  misc_feature (61)..(62): /note="This region represents a CpG dinucleotide"
  misc_feature (61)..(61): /note="Nucleotide may be methylated to form 5-methylcytosine"
ccctacagcacccctggcttctacagtagcacttgctatactcactgtaatccttgttggcgcatatatctctccagctagaccatcaatatctgcaggaatgtagcctttttcctgtaccc

SEQ ID NO: 23515 - DNA, 122 bp, Homo sapiens
  misc_feature (61)..(62): /note="This region represents a CpG dinucleotide"
  misc_feature (61)..(61): /note="Nucleotide may be methylated to form 5-methylcytosine"
aatgctgtccactggctgaacctcgctggaggccagctatctaagaagcctgggaaatgtcgttcataggagctgaccccctgcagtagagaggaggtagggggagggccaggactgggtgt

SEQ ID NO: 23516 - DNA, 122 bp, Homo sapiens
  misc_feature (61)..(62): /note="This region represents a CpG dinucleotide"
  misc_feature (61)..(61): /note="Nucleotide may be methylated to form 5-methylcytosine"
atttctgccccactgtaactgcaggttcatccctagaagattgtggtatttctggccatacgcaggaaaggtgccacagatgctcaagtataggcatcagctaccaccccatctgctggtgg

SEQ ID NO: 23517 - DNA, 122 bp, Homo sapiens
  misc_feature (61)..(62): /note="This region represents a CpG dinucleotide"
  misc_feature (61)..(61): /note="Nucleotide may be methylated to form 5-methylcytosine"
ttagagtgtttttaaagcagtttcaactcctgcatctagtctgggacctgatttgttatgcgtgtgtgtgtgtgtgtgtgtgtgtgtgtgtgtgtgtgtgtgtgtgtgtttatgtgtgcctg

SEQ ID NO: 23518 - DNA, 122 bp, Homo sapiens
  misc_feature (61)..(62): /note="This region represents a CpG dinucleotide"
  misc_feature (61)..(61): /note="Nucleotide may be methylated to form 5-methylcytosine"
gcatgatggtttgatccagtttcctctcaaatgccaagaggtccatgtaagcctgggactcggggaccagctcccgaatctggagaaggaggagcagggcaggagtcagaggctcaagtcca

SEQ ID NO: 23519 - DNA, 122 bp, Homo sapiens
  misc_feature (61)..(62): /note="This region represents a CpG dinucleotide"
  misc_feature (61)..(61): /note="Nucleotide may be methylated to form 5-methylcytosine"
taccccaaaatatatttctttgacatattttgaaatagttgacatatttctaaatattgacgtatttagaaagccagccagtagagctaatgcaaagctgtccttggtgcggaagatttgca

SEQ ID NO: 23520 - DNA, 122 bp, Homo sapiens
  misc_feature (61)..(62): /note="This region represents a CpG dinucleotide"
  misc_feature (61)..(61): /note="Nucleotide may be methylated to form 5-methylcytosine"
acgattaaggttgagaagaacatcactggcatggcgggtgaactggatacagctgtcagccggcgaggccattttgtcttcacttgaaaaaagaggccaaaatcctgttagtcctccagaac

SEQ ID NO: 23521 - DNA, 122 bp, Homo sapiens
  misc_feature (61)..(62): /note="This region represents a CpG dinucleotide"
  misc_feature (61)..(61): /note="Nucleotide may be methylated to form 5-methylcytosine"
aaaaaaggaatgaaagccagcagagagcagaccacaagagcaactagttatgcaagatgccgctatccttgtcaattccttcttcctgcctcagcacagcagaatagcaggtgcaatggttc

SEQ ID NO: 23522 - DNA, 122 bp, Homo sapiens
  misc_feature (61)..(62): /note="This region represents a CpG dinucleotide"
  misc_feature (61)..(61): /note="Nucleotide may be methylated to form 5-methylcytosine"
attccacaatgtttggctcctagtagcttttcagcaagtaattgcttaactgactttccccgctacagaagacgatgcttttcaagaatagacaattccatgtcacagatagtgtaggtgtg

SEQ ID NO: 23523 - DNA, 122 bp, Homo sapiens
  misc_feature (61)..(62): /note="This region represents a CpG dinucleotide"
  misc_feature (61)..(61): /note="Nucleotide may be methylated to form 5-methylcytosine"
tttttaaagctactgggcagaagcgtgaccaccagccaaggctgcttagaggcctgtcaccgctctccaactgcctgactcagaggatgcgctgggctcggccaggtggagctggagggcaa

SEQ ID NO: 23524 - DNA, 122 bp, Homo sapiens
  misc_feature (61)..(62): /note="This region represents a CpG dinucleotide"
  misc_feature (61)..(61): /note="Nucleotide may be methylated to form 5-methylcytosine"
aattggtctcactgcaggaaacagctttgtaaactgctgtccacctaaagtgtcatttatcgcatttgatatgcttaatataccttatattcttttgtaaatattcttcttacagccaaaaa

SEQ ID NO: 23525 - DNA, 122 bp, Homo sapiens
  misc_feature (61)..(62): /note="This region represents a CpG dinucleotide"
  misc_feature (61)..(61): /note="Nucleotide may be methylated to form 5-methylcytosine"
gctcttggccaccatatggagggactcatgcagtacacacagtctcaggtctgcttccttcgctcaacatcctgtgtgcagactcagccatgctgctggatgtagccattgctgctttcttg

SEQ ID NO: 23526 - DNA, 122 bp, Homo sapiens
  misc_feature (61)..(62): /note="This region represents a CpG dinucleotide"
  misc_feature (61)..(61): /note="Nucleotide may be methylated to form 5-methylcytosine"
caagctgtgcctgccattcttccagactctcctgtccagtgtgactcactttgccaacaacggaggcccagagtgcttctgtctcctcccagctgcgcagggaaacagaacccagaccagct

SEQ ID NO: 23527 - DNA, 122 bp, Homo sapiens
  misc_feature (61)..(62): /note="This region represents a CpG dinucleotide"
  misc_feature (61)..(61): /note="Nucleotide may be methylated to form 5-methylcytosine"
cagatccacatttctctgtgttggcttcattctcaggcacacactttgtatagtgggaaacgcccctgcagcttcagggtacacgatccttaatttaaagatcttataggatcctagagtgc

SEQ ID NO: 23528 - DNA, 122 bp, Homo sapiens
  misc_feature (61)..(62): /note="This region represents a CpG dinucleotide"
  misc_feature (61)..(61): /note="Nucleotide may be methylated to form 5-methylcytosine"
aagaatggggtaggtccttatgtactaatgtgaaacctctaagatagcactttaatgaaacgaaggtgtcttgcagtgtatactgtagtgtgctatgatatttataagagaaaaaaggcctg

SEQ ID NO: 23529 - DNA, 122 bp, Homo sapiens
  misc_feature (61)..(62): /note="This region represents a CpG dinucleotide"
  misc_feature (61)..(61): /note="Nucleotide may be methylated to form 5-methylcytosine"
ttttacagataagaaagtggtaaataaaatgctcaagaccgtatagttaatgtgtggtagcgccagagtgggaacttagacatccagccttaaaactgatcttttaacctctgtgctattct

SEQ ID NO: 23530 - DNA, 122 bp, Homo sapiens
  misc_feature (61)..(62): /note="This region represents a CpG dinucleotide"
  misc_feature (61)..(61): /note="Nucleotide may be methylated to form 5-methylcytosine"
ctgccactccaccacttcatggagtcagctcatctacaccacgggccaaacacttctggacgggagaccagatataaattaaggcaaggctgctgctgtcagatacatccccacctctccac

SEQ ID NO: 23531 - DNA, 122 bp, Homo sapiens
  misc_feature (61)..(62): /note="This region represents a CpG dinucleotide"
  misc_feature (61)..(61): /note="Nucleotide may be methylated to form 5-methylcytosine"
cggatattcaatttctctcaggcctagagctaacgtcatgtgtctggctgctaaaagctccggctccttttattaccacagtaaaggaagataacaggcgagaggtctgctgtagacattta

SEQ ID NO: 23532 - DNA, 122 bp, Homo sapiens
  misc_feature (61)..(62): /note="This region represents a CpG dinucleotide"
  misc_feature (61)..(61): /note="Nucleotide may be methylated to form 5-methylcytosine"
ttctgctaggttcatttgcatttctgattctgtttcttcatctgtaaacaggctgctgttcgtacctgcctcatggttttcttggggaggatcaatgaggtagaacctgcaaagggcttagc

SEQ ID NO: 23533 - DNA, 122 bp, Homo sapiens
  misc_feature (61)..(62): /note="This region represents a CpG dinucleotide"
  misc_feature (61)..(61): /note="Nucleotide may be methylated to form 5-methylcytosine"
tgcagccaggaatcaagacaacacaaatgagttctggaagtgattcatgctaggactgtacgctaaggcaatggggcagaaagcctgggagtgcagtttttttgtttttgttttttgttttt

SEQ ID NO: 23534 - DNA, 122 bp, Homo sapiens
  misc_feature (61)..(62): /note="This region represents a CpG dinucleotide"
  misc_feature (61)..(61): /note="Nucleotide may be methylated to form 5-methylcytosine"
ggcaggccagcctcatgctttagacatccttgctcttagcaaatctttcgtgttctgctacgtcagcctctgtgtgacacccattggaccttctctctgtagcacaattgcataccttgctc

SEQ ID NO: 23535 - DNA, 122 bp, Homo sapiens
  misc_feature (61)..(62): /note="This region represents a CpG dinucleotide"
  misc_feature (61)..(61): /note="Nucleotide may be methylated to form 5-methylcytosine"
gagggcaacatttggagcagagggacccctcttgccctggttaagttaagaagaaatgaacgaggaactcagggcaagaccaagagaggtgattcatcaactggccttcaactagaaaggag

SEQ ID NO: 23536 - DNA, 122 bp, Homo sapiens
  misc_feature (61)..(62): /note="This region represents a CpG dinucleotide"
  misc_feature (61)..(61): /note="Nucleotide may be methylated to form 5-methylcytosine"
tcccccaccctccagaggggtaaccagtgttaccagtttgctgtgtttcctgctacacctcgccttattcacttccatttgtatctgaaaaacgtgttgcatggtttcttttctatagaagt

SEQ ID NO: 23537 - DNA, 122 bp, Homo sapiens
  misc_feature (61)..(62): /note="This region represents a CpG dinucleotide"
  misc_feature (61)..(61): /note="Nucleotide may be methylated to form 5-methylcytosine"
gtgaatgagtgtcccagtcacctggaggcagaaatcaggagagtaagttaaaaagcacaacgaaacctattctggtacacatctgtttggagcagttgggtgtattgtaaatgtctcgcatg

SEQ ID NO: 23538 - DNA, 122 bp, Homo sapiens
  misc_feature (61)..(62): /note="This region represents a CpG dinucleotide"
  misc_feature (61)..(61): /note="Nucleotide may be methylated to form 5-methylcytosine"
atcatccagtgtgtgggaagtccaaatggagcacagaggcggagaaggggcgaagttactcgccctgtgtgatctggaacatccatcctctccggcctgcaggcatcagagctcctgggccg

SEQ ID NO: 23539 - DNA, 122 bp, Homo sapiens
  misc_feature (61)..(62): /note="This region represents a CpG dinucleotide"
  misc_feature (61)..(61): /note="Nucleotide may be methylated to form 5-methylcytosine"
gagagaaggagaaaaagaggcgtgactccttcatggatacacggttcctttagggtgatgcgattgtttggaaatagtggtaatggttgcacaacattgtgaaagcactcactgcctctgac

SEQ ID NO: 23540 - DNA, 122 bp, Homo sapiens
  misc_feature (61)..(62): /note="This region represents a CpG dinucleotide"
  misc_feature (61)..(61): /note="Nucleotide may be methylated to form 5-methylcytosine"
ccttgaaccttaattcctcagtacacttgagtataaaatacttttgagtcatatttcaaccgacaggctaaataagaggaggttttgatggctgtgagcagttgtgtggttcagagcagaga

SEQ ID NO: 23541 - DNA, 122 bp, Homo sapiens
  misc_feature (61)..(62): /note="This region represents a CpG dinucleotide"
  misc_feature (61)..(61): /note="Nucleotide may be methylated to form 5-methylcytosine"
tcagtttgctgagtttgtaatgtcctctctaagggagaagaaaagacattacaaactcaacgggaatgttcagcaggtatgtcatgaacttatctgctggtttcaacagatcttcccttcca

SEQ ID NO: 23542 - DNA, 122 bp, Homo sapiens
  misc_feature (61)..(62): /note="This region represents a CpG dinucleotide"
  misc_feature (61)..(61): /note="Nucleotide may be methylated to form 5-methylcytosine"
acatccttaacttgtcaaataatttgtaaaaccggggtcactgtgagccattttgggtaccgaagaaaaaaagtatttaggcaccctggcaaaggcaaccagctaaacagacttgttcctgg

SEQ ID NO: 23543 - DNA, 122 bp, Homo sapiens
  misc_feature (61)..(62): /note="This region represents a CpG dinucleotide"
  misc_feature (61)..(61): /note="Nucleotide may be methylated to form 5-methylcytosine"
gcacagcgtcggccggggccaggccgagccaggccacccctgttttccgcgccattggcccgcccggcccgccccaaccgacggcgccctcctgacccaggcagcctagcgctggggcccaa

SEQ ID NO: 23544 - DNA, 122 bp, Homo sapiens
  misc_feature (61)..(62): /note="This region represents a CpG dinucleotide"
  misc_feature (61)..(61): /note="Nucleotide may be methylated to form 5-methylcytosine"
tttaacattcaaggcgcgttatagtcttccagaattcttctggggaattgtaagcaaaaacgttcactgaccactagtttataaaagagggctgttagctagtagtttaaataagtcttggt

SEQ ID NO: 23545 - DNA, 122 bp, Homo sapiens
  misc_feature (61)..(62): /note="This region represents a CpG dinucleotide"
  misc_feature (61)..(61): /note="Nucleotide may be methylated to form 5-methylcytosine"
ttttcctgcctgtggaaggccctctctctgtttaggaacgtggatgtggcaggggctgggcgggcacttggcctttataacaacagaagaggattttcagtgacgaggaagcatcccgccct

SEQ ID NO: 23546 - DNA, 122 bp, Homo sapiens
  misc_feature (61)..(62): /note="This region represents a CpG dinucleotide"
  misc_feature (61)..(61): /note="Nucleotide may be methylated to form 5-methylcytosine"
gcttcctggtctcttagccaaattttctcccctcactcagctgtcactcagctctgcttacgagaatacatgatactccaggtcctgacgaggtaaatgggtgtactctgagaagacgtaga

SEQ ID NO: 23547 - DNA, 122 bp, Homo sapiens
  misc_feature (61)..(62): /note="This region represents a CpG dinucleotide"
  misc_feature (61)..(61): /note="Nucleotide may be methylated to form 5-methylcytosine"
taaaaaaaaatgggggcggtgagctaaatgaacaggtagtaaataacagcttaaatttcacgtgcaagtgatagccattctgcagcaggatgcattgtggactttttatcttcactatcatt

SEQ ID NO: 23548 - DNA, 122 bp, Homo sapiens
  misc_feature (61)..(62): /note="This region represents a CpG dinucleotide"
  misc_feature (61)..(61): /note="Nucleotide may be methylated to form 5-methylcytosine"
cttcacctgctggcagcttcacctgctggcatgctaataccattctcaaggtcactgagacgggcacttatggcttgccaaccaacaggacgtcatctacataaccaaagctatggacatca

SEQ ID NO: 23549 - DNA, 122 bp, Homo sapiens
  misc_feature (61)..(62): /note="This region represents a CpG dinucleotide"
  misc_feature (61)..(61): /note="Nucleotide may be methylated to form 5-methylcytosine"
atttaataagaggattgcttccagccaaatgcagggccagcaaggtcagcactgaacacacgcagctccactgagaaataaaggggccagatggttattacactgtgtgtgtttcttataaa

SEQ ID NO: 23550 - DNA, 122 bp, Homo sapiens
  misc_feature (61)..(62): /note="This region represents a CpG dinucleotide"
  misc_feature (61)..(61): /note="Nucleotide may be methylated to form 5-methylcytosine"
tgagttgtcatgaggggtaggattgtggctttttaagaggaagagagacctgtgctagcacgtgagcatgctctttccccgcaccgggtgatatcctgcactgcctcaggactttgcagagg

SEQ ID NO: 23551 - DNA, 122 bp, Homo sapiens
  misc_feature (61)..(62): /note="This region represents a CpG dinucleotide"
  misc_feature (61)..(61): /note="Nucleotide may be methylated to form 5-methylcytosine"
caaacactgcagcgtcaagaagaattgcaattgtcagaaatatcatattcctgtcaaaagcgcatgaaatcaattctgtaaattgagaaacataagtcacagttatatttgttctgcaacca

SEQ ID NO: 23552 - DNA, 122 bp, Homo sapiens
  misc_feature (61)..(62): /note="This region represents a CpG dinucleotide"
  misc_feature (61)..(61): /note="Nucleotide may be methylated to form 5-methylcytosine"
cctagccattaggatacagtgacgaaaaagtctctcgttatctagaagggcagacaaacacgcagacttttaaaataccagatggcaggccgggcgtgatggctcacgcctgtaatcccaag

SEQ ID NO: 23553 - DNA, 122 bp, Homo sapiens
  misc_feature (61)..(62): /note="This region represents a CpG dinucleotide"
  misc_feature (61)..(61): /note="Nucleotide may be methylated to form 5-methylcytosine"
taaacacaacagctatgtcctgattaaccccagaggcaggaggaggtcagaccaatgctgcgtaattctagttaagccacctaagcagttgaaggaagcttagcctgctgcttcctaaataa

SEQ ID NO: 23554 - DNA, 122 bp, Homo sapiens
  misc_feature (61)..(62): /note="This region represents a CpG dinucleotide"
  misc_feature (61)..(61): /note="Nucleotide may be methylated to form 5-methylcytosine"
cagccctcaatcagtagggtttagacacctgtttttgcctgcccagcctcctcttggaaacgcctctgccacgattgatggaagacagaaagtcacttttccagcagagcagagtacacatg

SEQ ID NO: 23555 - DNA, 122 bp, Homo sapiens
  misc_feature (61)..(62): /note="This region represents a CpG dinucleotide"
  misc_feature (61)..(61): /note="Nucleotide may be methylated to form 5-methylcytosine"
cgatagttccttattgaggccacatcaaataatgtacttagacatactcctgtggttgcccgttaatctctcgtttgagcggtttaatgctgccagcgtctcaatctttgtaccacattctt

SEQ ID NO: 23556 - DNA, 122 bp, Homo sapiens
  misc_feature (61)..(62): /note="This region represents a CpG dinucleotide"
  misc_feature (61)..(61): /note="Nucleotide may be methylated to form 5-methylcytosine"
tcacgctttcactgcctttgccagggcctgttacagtgtgctggatggcagcagttctagcgcagatgtactcatcgcctggaagcacggataatgagctccactcctttcatgctcagcag

SEQ ID NO: 23557 - DNA, 122 bp, Homo sapiens
  misc_feature (61)..(62): /note="This region represents a CpG dinucleotide"
  misc_feature (61)..(61): /note="Nucleotide may be methylated to form 5-methylcytosine"
gagtgagccgggcacacagttcccaggccccaaacaggcttgtctcattctgcatgacatcgctgtttctagaggtggaggcatagccaaacaggttgatccagtagttccctgcctcaggc

SEQ ID NO: 23558 - DNA, 122 bp, Homo sapiens
  misc_feature (61)..(62): /note="This region represents a CpG dinucleotide"
  misc_feature (61)..(61): /note="Nucleotide may be methylated to form 5-methylcytosine"
attcgagccaatactggatcttaacccagtgtttactattctgtgcagtgttccattattcgtggattgctaacaatgaaagaaagcatagaaatgatatagttcaacctccttattttaaa

SEQ ID NO: 23559 - DNA, 122 bp, Homo sapiens
  misc_feature (61)..(62): /note="This region represents a CpG dinucleotide"
  misc_feature (61)..(61): /note="Nucleotide may be methylated to form 5-methylcytosine"
ggaattacaggcgtgagccaccatgcctggctatacttcttagcttacttttttattacgcgtatatattaagaacttttaaaagtccaaattaaagaagcatgcctagacatcattaaaat

SEQ ID NO: 23560 - DNA, 122 bp, Homo sapiens
  misc_feature (61)..(62): /note="This region represents a CpG dinucleotide"
  misc_feature (61)..(61): /note="Nucleotide may be methylated to form 5-methylcytosine"
tctgcacaggatgagtgttcggaggggaagtgactgagccaccccggctctaccacggcacgctgacaggaagcagaggctcccagttctagtcggggcacacctatgatccaactttccct

SEQ ID NO: 23561 - DNA, 122 bp, Homo sapiens
  misc_feature (61)..(62): /note="This region represents a CpG dinucleotide"
  misc_feature (61)..(61): /note="Nucleotide may be methylated to form 5-methylcytosine"
atctattttcaagacattggaataaaggctctttaactatgttcagtggccaaagactcccgcaaaggtgaatggatccatgtataacctgccatacctccaggaaagaatgggaaagtctc

SEQ ID NO: 23562 - DNA, 122 bp, Homo sapiens
  misc_feature (61)..(62): /note="This region represents a CpG dinucleotide"
  misc_feature (61)..(61): /note="Nucleotide may be methylated to form 5-methylcytosine"
aaggtcgcacagcccagaaatggccaagctgggatctgaacccgggcccaggagtccagacgctgcgctgttaaccacagcactgccctgcccccagagaaaggggctttcagcctcttcac

SEQ ID NO: 23563 - DNA, 122 bp, Homo sapiens
  misc_feature (61)..(62): /note="This region represents a CpG dinucleotide"
  misc_feature (61)..(61): /note="Nucleotide may be methylated to form 5-methylcytosine"
ccctgccaaggtagcgaaggaagaagggtgagatctctgcaagaaatgctgatgaatccacgtcagggcatttttagtcagaaatggtatcctctggtatgacatcagaagagtttaagact

SEQ ID NO: 23564 - DNA, 122 bp, Homo sapiens
  misc_feature (61)..(62): /note="This region represents a CpG dinucleotide"
  misc_feature (61)..(61): /note="Nucleotide may be methylated to form 5-methylcytosine"
atctaccgcctgatgagtgaactctaccatcctgatgatcatgttttatgaccgaccacacgtgtcctaagcagattgcttaggcagatacagaatgaagaggagacttgagtgttgctgct

SEQ ID NO: 23565 - DNA, 122 bp, Homo sapiens
  misc_feature (61)..(62): /note="This region represents a CpG dinucleotide"
  misc_feature (61)..(61): /note="Nucleotide may be methylated to form 5-methylcytosine"
atcccactcatgctctcagaatagcaattgactgcatgagtctggagtttaggggaagttcgggctgtaaataaagacttggacggataggcagttgtgtgctggtaatgtttaccaactga

SEQ ID NO: 23566 - DNA, 122 bp, Homo sapiens
  misc_feature (61)..(62): /note="This region represents a CpG dinucleotide"
  misc_feature (61)..(61): /note="Nucleotide may be methylated to form 5-methylcytosine"
gagatgatccgggccgcggacacggacggagacggacaggtgaactacgaggagtttgtccgtgtgctggtgtccaagtgaggccggcgcccaccatgctcctgggcgcccacgcggcccac

SEQ ID NO: 23567 - DNA, 122 bp, Homo sapiens
  misc_feature (61)..(62): /note="This region represents a CpG dinucleotide"
  misc_feature (61)..(61): /note="Nucleotide may be methylated to form 5-methylcytosine"
aggcaagaagtctgctgacctcgcagtacccgaattttgtttctgaattccacatcacagcgctgtccttggccaagtacaacatgaagatgctacatgttggcccagcaggaaggggcaca

SEQ ID NO: 23568 - DNA, 122 bp, Homo sapiens
  misc_feature (61)..(62): /note="This region represents a CpG dinucleotide"
  misc_feature (61)..(61): /note="Nucleotide may be methylated to form 5-methylcytosine"
atgtttagaagacattaaacctctggaggtttaattttgcaacttccccaaatacttagacgacttcaaaaataattttgcttttgtctaaactcagaaattatattgttcttttttgccct

SEQ ID NO: 23569 - DNA, 122 bp, Homo sapiens
  misc_feature (61)..(62): /note="This region represents a CpG dinucleotide"
  misc_feature (61)..(61): /note="Nucleotide may be methylated to form 5-methylcytosine"
acttctccaaactggtaataccgctttccttttggtccttttaggacttcttctactcatcgtcatggagatcgtcaactgtcatggcatggatgggagcgcaatttagcctggaaacggga

SEQ ID NO: 23570 - DNA, 122 bp, Homo sapiens
  misc_feature (61)..(62): /note="This region represents a CpG dinucleotide"
  misc_feature (61)..(61): /note="Nucleotide may be methylated to form 5-methylcytosine"
tgtagcctagtgaatcagtgtcagatccaagatttgactccagggagcctgatcccaaagcggttgtctctaaagtctcactgggtctccatcagacctggctgtgtgacccaggataaatt

SEQ ID NO: 23571 - DNA, 122 bp, Homo sapiens
  misc_feature (61)..(62): /note="This region represents a CpG dinucleotide"
  misc_feature (61)..(61): /note="Nucleotide may be methylated to form 5-methylcytosine"
caatattaaaaataatttaaagttccctaaactaatttataaatttgtgcaattcaaaaacgaaacagcagaaccaagagtgtttggcatgaaacttgacagagtgattctaaaattagccg

SEQ ID NO: 23572 - DNA, 122 bp, Homo sapiens
  misc_feature (61)..(62): /note="This region represents a CpG dinucleotide"
  misc_feature (61)..(61): /note="Nucleotide may be methylated to form 5-methylcytosine"
tcttataaataaaccaggcaatcacacactgcagaaataactagaatttctatgacttcacggggagccaaatggaaatgcccttgccaagtgaatgctaaagtcatcccatagtcaaaatg

SEQ ID NO: 23573 - DNA, 122 bp, Homo sapiens
  misc_feature (61)..(62): /note="This region represents a CpG dinucleotide"
  misc_feature (61)..(61): /note="Nucleotide may be methylated to form 5-methylcytosine"
tgcgcagacacgtgggtgcgggaggggcagagctggtccggcgcggggcttgccgcgtctcggcctcagtctcggagccaggacctcaggcctgaatggctgggtgtggagggcccttgtct

SEQ ID NO: 23574 - DNA, 122 bp, Homo sapiens
  misc_feature (61)..(62): /note="This region represents a CpG dinucleotide"
  misc_feature (61)..(61): /note="Nucleotide may be methylated to form 5-methylcytosine"
tttggtttacaaaaaacccatacacccatttcttttttcctctctgataggattagtttccgtcagtacagcttgaatgcccagctgttgctctgggtaattccccagtccttttcttaatc

SEQ ID NO: 23575 - DNA, 122 bp, Homo sapiens
  misc_feature (61)..(62): /note="This region represents a CpG dinucleotide"
  misc_feature (61)..(61): /note="Nucleotide may be methylated to form 5-methylcytosine"
attctgcaactttagtttagttgctccatccttccaattgctcacacctgaagtcttcatcgtctgtgacttttgtctttttctcatgtcttatacctaatccttcagggttttgtgctgtc

SEQ ID NO: 23576 - DNA, 122 bp, Homo sapiens
  misc_feature (61)..(62): /note="This region represents a CpG dinucleotide"
  misc_feature (61)..(61): /note="Nucleotide may be methylated to form 5-methylcytosine"
aggcttttgtctgacctaatttatttctctttcaggttagaataaagcactctttcctgtcgcagggtaacctcttctgctcatatattgaactctagcataagactcagggtgcagtctgc

SEQ ID NO: 23577 - DNA, 122 bp, Homo sapiens
  misc_feature (61)..(62): /note="This region represents a CpG dinucleotide"
  misc_feature (61)..(61): /note="Nucleotide may be methylated to form 5-methylcytosine"
ccaagtccagctgaatcacctcccatagggcttgtcaatcctgtcacagtgagctatgatcgtgccactgtaccccagcatgggggacagagtgagatcctgtctataaattaaataaagca

SEQ ID NO: 23578 - DNA, 122 bp, Homo sapiens
  misc_feature (61)..(62): /note="This region represents a CpG dinucleotide"
  misc_feature (61)..(61): /note="Nucleotide may be methylated to form 5-methylcytosine"
tggtgagactccatctctacccaaaatacaaaaaataagctgggtgtggtggttcgcgcccgtagtcccagctactggggaggctgaggcaggattgcttgagccccagaaccagaggttgc

SEQ ID NO: 23579 - DNA, 122 bp, Homo sapiens
  misc_feature (61)..(62): /note="This region represents a CpG dinucleotide"
  misc_feature (61)..(61): /note="Nucleotide may be methylated to form 5-methylcytosine"
actattcctgtaagttatgtattcagtgaaaggttaattagaaactcaaaagaatgcagtcgtacctatgacctggaaacccaggtcataggtatgtatcagtgaaaggctaattagaaact

SEQ ID NO: 23580 - DNA, 122 bp, Homo sapiens
  misc_feature (61)..(62): /note="This region represents a CpG dinucleotide"
  misc_feature (61)..(61): /note="Nucleotide may be methylated to form 5-methylcytosine"
ccccagttttcaaaagacgtaactgagtcacagaaaccaagctcaaccactggagtgtaccgctatttaaagatgcctgatgacagtgtggtttgaatttgcaaaacccagaataaacatgg

SEQ ID NO: 23581 - DNA, 122 bp, Homo sapiens
  misc_feature (61)..(62): /note="This region represents a CpG dinucleotide"
  misc_feature (61)..(61): /note="Nucleotide may be methylated to form 5-methylcytosine"
caaggaaaccacagaattacaaacccttgaagctggagcatctaaactactaatacaacacgaatgttcaaagctcagcctcaccagttattaaagagatgatcttttaaagacagtaagaa

SEQ ID NO: 23582 - DNA, 122 bp, Homo sapiens
  misc_feature (61)..(62): /note="This region represents a CpG dinucleotide"
  misc_feature (61)..(61): /note="Nucleotide may be methylated to form 5-methylcytosine"
actgcagatttaggggttccatccaaacattctgataagaaaggccaagccagcagatcgcgcctgcatatctgccagagagcctggaagaatgtcagcgctttcctgctgcttcctggtca

SEQ ID NO: 23583 - DNA, 122 bp, Homo sapiens
  misc_feature (61)..(62): /note="This region represents a CpG dinucleotide"
  misc_feature (61)..(61): /note="Nucleotide may be methylated to form 5-methylcytosine"
ataaataatgctgctatgaacatttgtgtgcaagtttttgtggacatgtgattcatttggcgtgagtatatatgaggagtagaattgctaggtcatttggtaactttatgtttaagcttttg

SEQ ID NO: 23584 - DNA, 122 bp, Homo sapiens
  misc_feature (61)..(62): /note="This region represents a CpG dinucleotide"
  misc_feature (61)..(61): /note="Nucleotide may be methylated to form 5-methylcytosine"
atcaaatgagtaagtcaacatagtaaaagaaaagaacagttctttatcagattaaatgagcgaaacagctaaatgtcaagtgacaaaacattgggactgactgtataaaatgctaataacat

SEQ ID NO: 23585 - DNA, 122 bp, Homo sapiens
  misc_feature (61)..(62): /note="This region represents a CpG dinucleotide"
  misc_feature (61)..(61): /note="Nucleotide may be methylated to form 5-methylcytosine"
gaagtggctttttgagcaggatatggctgtgtgcaaaccttcacattgggacttccttcacgctccttctcactaacaggctccttgacttgtttttaagctttctggcagacaacggatct

SEQ ID NO: 23586 - DNA, 122 bp, Homo sapiens
  misc_feature (61)..(62): /note="This region represents a CpG dinucleotide"
  misc_feature (61)..(61): /note="Nucleotide may be methylated to form 5-methylcytosine"
gtgcgttagtgttggctctgtcgttctgtcaaagtgtggacagcaaatagctgtcctggccgttcctgggtggagttggggatgttgagccatctgctgaagggcagctcttcccgtgagtc

SEQ ID NO: 23587 - DNA, 122 bp, Homo sapiens
  misc_feature (61)..(62): /note="This region represents a CpG dinucleotide"
  misc_feature (61)..(61): /note="Nucleotide may be methylated to form 5-methylcytosine"
ccataaggaatgctgtttggccttttgtttcttagtgccagactgcaccagctgcatgcacgtaaggaaggaggacagttcacgaagggtttcacaggtcatggtcacgactctggctttca

SEQ ID NO: 23588 - DNA, 122 bp, Homo sapiens
  misc_feature (61)..(62): /note="This region represents a CpG dinucleotide"
  misc_feature (61)..(61): /note="Nucleotide may be methylated to form 5-methylcytosine"
ggcagaaacatgacaaggtgtgtctcagacgactagaagtaaaacctcacaccttggaatcgccagataaacattccttggcctttgttgtacgcgtcgaaaggattgatggtgtgagttta

SEQ ID NO: 23589 - DNA, 122 bp, Homo sapiens
  misc_feature (61)..(62): /note="This region represents a CpG dinucleotide"
  misc_feature (61)..(61): /note="Nucleotide may be methylated to form 5-methylcytosine"
tcccaggcacatgttgtgcaactgagccatggggctagggtagaaagccgtagtgagatacggtcccgcgtctcaaagagtcagcattcaaggggcgtgtgtgtataatacaaggcggagaa

SEQ ID NO: 23590 - DNA, 122 bp, Homo sapiens
  misc_feature (61)..(62): /note="This region represents a CpG dinucleotide"
  misc_feature (61)..(61): /note="Nucleotide may be methylated to form 5-methylcytosine"
tctctcataaaaacaaaggacaccattgttagtatctgactcacatcagtgctgtgacaacgcaaggtgtctcagcacctggaagaaaccagcagcattagtaagtgttcccattatagaac

SEQ ID NO: 23591 - DNA, 122 bp, Homo sapiens
  misc_feature (61)..(62): /note="This region represents a CpG dinucleotide"
  misc_feature (61)..(61): /note="Nucleotide may be methylated to form 5-methylcytosine"
gtggcgcgcgcctgtaatcccagctccccgggaggctgaggtcggcggatcgtgggtgctcgggggttcggagctacggcgctgtgtggagcgggcgtccgcaccgggcctggcaccaacat

SEQ ID NO: 23592 - DNA, 122 bp, Homo sapiens
  misc_feature (61)..(62): /note="This region represents a CpG dinucleotide"
  misc_feature (61)..(61): /note="Nucleotide may be methylated to form 5-methylcytosine"
cagtctgatattgtttccttttctaaaatgtggtttaatttcgtaaagagccgagtaggacggcagagctgaatcataggaaatgtcagcatgcaagctctacacccatgattacaaaacgg

SEQ ID NO: 23593 - DNA, 122 bp, Homo sapiens
  misc_feature (61)..(62): /note="This region represents a CpG dinucleotide"
  misc_feature (61)..(61): /note="Nucleotide may be methylated to form 5-methylcytosine"
cccacatcctccctagatgccctgcttttgtctatcctgccgcttcactctcttccttcacgccctctcacaagatatttcctggttccacccacggaacgacaccctggaggcctttttca

SEQ ID NO: 23594 - DNA, 122 bp, Homo sapiens
  misc_feature (61)..(62): /note="This region represents a CpG dinucleotide"
  misc_feature (61)..(61): /note="Nucleotide may be methylated to form 5-methylcytosine"
ttgtaatttgtttgaaaccccaaacagtgactgtactttctattttaatcttgctactaccgttatacacatatagtgtacagccagaccagattaaacttcatatgtaatctctaggaagt

SEQ ID NO: 23595 - DNA, 122 bp, Homo sapiens
  misc_feature (61)..(62): /note="This region represents a CpG dinucleotide"
  misc_feature (61)..(61): /note="Nucleotide may be methylated to form 5-methylcytosine"
atgtagccaccacctttaccaagtgatcaaatttagcattactaatataactgagttatgcgtccccgtgagttggcaacatctcttaggtagtattgcaaaagtgctcaaactgaatctaa

SEQ ID NO: 23596 - DNA, 122 bp, Homo sapiens
  misc_feature (61)..(62): /note="This region represents a CpG dinucleotide"
  misc_feature (61)..(61): /note="Nucleotide may be methylated to form 5-methylcytosine"
agacctggccctgccaccaactagcaagtatgaccttgagtgagtcaccttaatttgggccgtagtttcctcatgtgtaaaaataggtataatcacatctgctcagctctaccacaggattg

SEQ ID NO: 23597 - DNA, 122 bp, Homo sapiens
  misc_feature (61)..(62): /note="This region represents a CpG dinucleotide"
  misc_feature (61)..(61): /note="Nucleotide may be methylated to form 5-methylcytosine"
agtctcagtcttccatatgtagatttgcacttcattttcattttcagaacggtgcctcagcgctcattctctctgcctttgtttctgaatttgatgcttctctacttgaatttctcaagaaa

SEQ ID NO: 23598 - DNA, 122 bp, Homo sapiens
  misc_feature (61)..(62): /note="This region represents a CpG dinucleotide"
  misc_feature (61)..(61): /note="Nucleotide may be methylated to form 5-methylcytosine"
agaaagtgcacaccctaatttagggatatttatatccatataaaataaagtgtatctccgcgtttatactgcgccacctttggggaaaagtgtagtagtctctaatcagggctggtgatggc

SEQ ID NO: 23599 - DNA, 122 bp, Homo sapiens
  misc_feature (61)..(62): /note="This region represents a CpG dinucleotide"
  misc_feature (61)..(61): /note="Nucleotide may be methylated to form 5-methylcytosine"
tgggttccagtgccacctcaccaccgtgtgaccctggacaggtgacttctctctgagtctcgatttcttgatgtgttaggtgggtgatgatagtgcctgccctgcagccaccttgtgagtgt

SEQ ID NO: 23600 - DNA, 122 bp, Homo sapiens
  misc_feature (61)..(62): /note="This region represents a CpG dinucleotide"
  misc_feature (61)..(61): /note="Nucleotide may be methylated to form 5-methylcytosine"
tcctgcagaacgggtctctgggcctgagcccaccatcagggttggcagccacctccggggcggtgctatctttgctatggtatctctgcttagtaataagaactaaggtgtatgggagctca

SEQ ID NO: 23601 - DNA, 122 bp, Homo sapiens
  misc_feature (61)..(62): /note="This region represents a CpG dinucleotide"
  misc_feature (61)..(61): /note="Nucleotide may be methylated to form 5-methylcytosine"
taaactccccccaaggagaccaggcagggcagagacaatggctgcaggaaatcattcaggcgggacatgctggcctgccctccacccagtccccctgtgggccccactcccttctgattcag

SEQ ID NO: 23602 - DNA, 122 bp, Homo sapiens
  misc_feature (61)..(62): /note="This region represents a CpG dinucleotide"
  misc_feature (61)..(61): /note="Nucleotide may be methylated to form 5-methylcytosine"
agcgcaggccaggccaggggttaccggcggtgcctgctgcacctgtgagaacccaggaggcgcaccccggttctcatacaccgctctgtctgtaccaaacgccaccgccctcatccattttc

SEQ ID NO: 23603 - DNA, 122 bp, Homo sapiens
  misc_feature (61)..(62): /note="This region represents a CpG dinucleotide"
  misc_feature (61)..(61): /note="Nucleotide may be methylated to form 5-methylcytosine"
cattccaagttacacgatctgacaagacatggagcgacctgagtttgcgtgtttctaacacgttggcttgaatccagcatgtgctggtgctggctgtgtcctgatgtggcagtgagagctgc

SEQ ID NO: 23604 - DNA, 122 bp, Homo sapiens
  misc_feature (61)..(62): /note="This region represents a CpG dinucleotide"
  misc_feature (61)..(61): /note="Nucleotide may be methylated to form 5-methylcytosine"
tgcatttagtcattttcagtttttttccaagacttttggcaagcctttctccacatgttccgggctggatctcagggtcggaaggggaacagagccagttttggggcttaggggaaacagcg

SEQ ID NO: 23605 - DNA, 122 bp, Homo sapiens
  misc_feature (61)..(62): /note="This region represents a CpG dinucleotide"
  misc_feature (61)..(61): /note="Nucleotide may be methylated to form 5-methylcytosine"
cttcagacacatttggtacatccagaaatagatccaagaaatggggtggttgagtgggtccgcacgaaatgcttgattatgtcagcaacacccaacactgtctgttttccatttgttggttt

SEQ ID NO: 23606 - DNA, 122 bp, Homo sapiens
  misc_feature (61)..(62): /note="This region represents a CpG dinucleotide"
  misc_feature (61)..(61): /note="Nucleotide may be methylated to form 5-methylcytosine"
atgcactctgacaggggctatctctgagctctaacagagatggggttgcttggaggagcacgctgtggcaatgacaggctcttaaaccagagcaatggtatctcatctagcaggatttcccc

SEQ ID NO: 23607 - DNA, 122 bp, Homo sapiens
  misc_feature (61)..(62): /note="This region represents a CpG dinucleotide"
  misc_feature (61)..(61): /note="Nucleotide may be methylated to form 5-methylcytosine"
gatcagatggcaacctttagggttcctttacgatcagatcagtttaaatgaaaaaaaaatcgggtgtaatttttatcaccagggagcactggcctggagtatttccatttctaaagagcggt

SEQ ID NO: 23608 - DNA, 122 bp, Homo sapiens
  misc_feature (61)..(62): /note="This region represents a CpG dinucleotide"
  misc_feature (61)..(61): /note="Nucleotide may be methylated to form 5-methylcytosine"
ttaattcttgaagagggtctttccaaacataacaaaacacttagaagtcatacaggaaaacgtttaaaaaaatgactacgtaaaaactaaaaggccgggcacggtggctcacgcctgtaatt

SEQ ID NO: 23609 - DNA, 122 bp, Homo sapiens
  misc_feature (61)..(62): /note="This region represents a CpG dinucleotide"
  misc_feature (61)..(61): /note="Nucleotide may be methylated to form 5-methylcytosine"
ctccttgtccccgtggctcaccaggcaggaagcccgtggcttggctgaggccccaggaagcggagtctgggaggtgaaccgtacctcaggcccagccgtgttcagcttggagtagcttctga

SEQ ID NO: 23610 - DNA, 122 bp, Homo sapiens
  misc_feature (61)..(62): /note="This region represents a CpG dinucleotide"
  misc_feature (61)..(61): /note="Nucleotide may be methylated to form 5-methylcytosine"
tgagccgcgcccgtcttcccgggccgcgtgtcgtgagccgcacccatcttcctggggctacgtgtcttgagcggcacccatatacctgctgtgcactggctggcctcaagctttgtcctgaa

SEQ ID NO: 23611 - DNA, 122 bp, Homo sapiens
  misc_feature (61)..(62): /note="This region represents a CpG dinucleotide"
  misc_feature (61)..(61): /note="Nucleotide may be methylated to form 5-methylcytosine"
cagaaaatgagaaatgaatttaaaatgagccaagacttgcaagagggagagggaaaaacacgagagagccccttctattattcctagcccgggaagagccttccagatttcctgggtatctt

SEQ ID NO: 23612 - DNA, 122 bp, Homo sapiens
  misc_feature (61)..(62): /note="This region represents a CpG dinucleotide"
  misc_feature (61)..(61): /note="Nucleotide may be methylated to form 5-methylcytosine"
accccctagatttgtcttttgcttttcatttgataaatcacatttctaagtggtaggtttcgtaatgcctggtaataagataggctttttaattagaagtttgttttcattaccaatttaat

SEQ ID NO: 23613 - DNA, 122 bp, Homo sapiens
  misc_feature (61)..(62): /note="This region represents a CpG dinucleotide"
  misc_feature (61)..(61): /note="Nucleotide may be methylated to form 5-methylcytosine"
gacacacacccacgtgccctgggctttctggattggcctgcagtgactggcagacagtgacggcagaacaccctgtgacatcacccatgccacggggagctcaccgtgtcacctgctctgac

SEQ ID NO: 23614 - DNA, 122 bp, Homo sapiens
  misc_feature (61)..(62): /note="This region represents a CpG dinucleotide"
  misc_feature (61)..(61): /note="Nucleotide may be methylated to form 5-methylcytosine"
ttttctagttaccactccttttttttctgaaatgaaaagtcaaggcatgtgaaaacctgacgttcacagtaatctaagcacatccttgctctgtcagggagagattctgcctccagatggtg

SEQ ID NO: 23615 - DNA, 122 bp, Homo sapiens
  misc_feature (61)..(62): /note="This region represents a CpG dinucleotide"
  misc_feature (61)..(61): /note="Nucleotide may be methylated to form 5-methylcytosine"
gatataaagatgccaaatgacacctgcacacacagtgggttgtgttacagaaaaatcctgcgcttagggaacccaaatcttttgtaatagtcagtaagcatgccttaccattgctttcttcc

SEQ ID NO: 23616 - DNA, 122 bp, Homo sapiens
  misc_feature (61)..(62): /note="This region represents a CpG dinucleotide"
  misc_feature (61)..(61): /note="Nucleotide may be methylated to form 5-methylcytosine"
tgtatttactggtcctgaatgcacgtgatgctgaattaatgtctgagcgcaacagtcatccgtgccacagatggcaccaagcaccaagcttcggaggcccccgcagtctgtgggagacaatc

SEQ ID NO: 23617 - DNA, 122 bp, Homo sapiens
  misc_feature (61)..(62): /note="This region represents a CpG dinucleotide"
  misc_feature (61)..(61): /note="Nucleotide may be methylated to form 5-methylcytosine"
tgtagcaataagtaatagtatttcgtaataagtagtaagtaattgctacttgccagacaccgttctgagggcttcttgtatgttaactcatttaatcttcacaacaaccttttaaggaaggt

SEQ ID NO: 23618 - DNA, 122 bp, Homo sapiens
  misc_feature (61)..(62): /note="This region represents a CpG dinucleotide"
  misc_feature (61)..(61): /note="Nucleotide may be methylated to form 5-methylcytosine"
tgatgttagcctgcctcacgcaattcatccacagtccttcccagaagttttcaaaaaccacgatgttgttttcaatgaaggccgacactctccactgaggcatgacagtgacagccactgtg

SEQ ID NO: 23619 - DNA, 122 bp, Homo sapiens
  misc_feature (61)..(62): /note="This region represents a CpG dinucleotide"
  misc_feature (61)..(61): /note="Nucleotide may be methylated to form 5-methylcytosine"
tgggaggggcgcttgcacagtgtgtttactgaagctgcgcacatgctcacttgaggcgttcgtcccttaccagtccagtgttcctagaggaaggtcatataccagttaaactctgccatttt

SEQ ID NO: 23620 - DNA, 122 bp, Homo sapiens
  misc_feature (61)..(62): /note="This region represents a CpG dinucleotide"
  misc_feature (61)..(61): /note="Nucleotide may be methylated to form 5-methylcytosine"
aagggagttgtataagtcatggttccacaacgctgttgtgtgttgttttgctttttatcacgggattcattaagttttgaggactttcattacgttttgaagagataataagttgataattc

SEQ ID NO: 23621 - DNA, 122 bp, Homo sapiens
  misc_feature (61)..(62): /note="This region represents a CpG dinucleotide"
  misc_feature (61)..(61): /note="Nucleotide may be methylated to form 5-methylcytosine"
taagtgcttgaaaagaacatttctcttttctgttaggctgctgctgctaaaatgtaagcccgaagctacctctggccagactatctcttccctcttctatatataggaagtttgtctgcagt

SEQ ID NO: 23622 - DNA, 122 bp, Homo sapiens
  misc_feature (61)..(62): /note="This region represents a CpG dinucleotide"
  misc_feature (61)..(61): /note="Nucleotide may be methylated to form 5-methylcytosine"
cttttctctgagcaggtgcgggcattctatgtgaacgtgctgaatgaggaacagaggaaacgtctgtgtgagaacattgccggccacctgaaggatgcacaaattttcatccagaagaaagc

SEQ ID NO: 23623 - DNA, 122 bp, Homo sapiens
  misc_feature (61)..(62): /note="This region represents a CpG dinucleotide"
  misc_feature (61)..(61): /note="Nucleotide may be methylated to form 5-methylcytosine"
aaagaaacacagtcatttgccatggtggtcccttaagattacaatggctacaccatcaaccgtagtatgtagtgggctgtaccatctaggtttgtggaaatgcactccatgatggttgcaga

SEQ ID NO: 23624 - DNA, 122 bp, Homo sapiens
  misc_feature (61)..(62): /note="This region represents a CpG dinucleotide"
  misc_feature (61)..(61): /note="Nucleotide may be methylated to form 5-methylcytosine"
aagaaagggcccttatgaatcatcttcaagttcctcccttccaagaacagagatgctaggcgacttgcccagaggcacacagccagcatgtagcaggattcatgcctgtgggagctggggtt

SEQ ID NO: 23625 - DNA, 122 bp, Homo sapiens
  misc_feature (61)..(62): /note="This region represents a CpG dinucleotide"
  misc_feature (61)..(61): /note="Nucleotide may be methylated to form 5-methylcytosine"
tagcttacgtagtggaacagtaaatagtattaactggctaatgaccgacacagcaggctccgccacctctccctatgctcacccaatgatcacctcaccatcagcccaccctcagcctatag

SEQ ID NO: 23626 - DNA, 122 bp, Homo sapiens
  misc_feature (61)..(62): /note="This region represents a CpG dinucleotide"
  misc_feature (61)..(61): /note="Nucleotide may be methylated to form 5-methylcytosine"
gagattacaggtgtgagtcatcatgcccagccaacaggttactcttgagagtacaaacctcgcaacatcaccagcacaaaaatccccaactcaggcttggcatccagggaatgtgatctatg

SEQ ID NO: 23627 - DNA, 122 bp, Homo sapiens
  misc_feature (61)..(62): /note="This region represents a CpG dinucleotide"
  misc_feature (61)..(61): /note="Nucleotide may be methylated to form 5-methylcytosine"
tagaggaaacacaattcaaacacagaaatacaatctgaaatgaacttcctgatactagggcgaggaaaatataaatgtttggaaaggaaaccatctggtctctcaactttatggatcttaaa

SEQ ID NO: 23628 - DNA, 122 bp, Homo sapiens
  misc_feature (61)..(62): /note="This region represents a CpG dinucleotide"
  misc_feature (61)..(61): /note="Nucleotide may be methylated to form 5-methylcytosine"
gttatgactgattgctctacctggaaacttactgagctgtgacatgtctgtgtctcccatcgaagcaattgtgaaacacacattcagagacacccaatttacatgactggcaacactgtgac

SEQ ID NO: 23629 - DNA, 122 bp, Homo sapiens
  misc_feature (61)..(62): /note="This region represents a CpG dinucleotide"
  misc_feature (61)..(61): /note="Nucleotide may be methylated to form 5-methylcytosine"
ctcccaaagtgctgggattacaggcttaatcccagagccacaatacaaagccaccatgcccggcctctgaattttttttttttttaatttttcttatttattttgagacaggttcttgttct

SEQ ID NO: 23630 - DNA, 122 bp, Homo sapiens
  misc_feature (61)..(62): /note="This region represents a CpG dinucleotide"
  misc_feature (61)..(61): /note="Nucleotide may be methylated to form 5-methylcytosine"
attggcctgatttcaatattattgtatttcagggagtaggtccaaggagagggtgatagccgggggaatgattggtccgtgaagcagtcagagcacatgcaacacttctcagtttaagtttc

SEQ ID NO: 23631 - DNA, 122 bp, Homo sapiens
  misc_feature (61)..(62): /note="This region represents a CpG dinucleotide"
  misc_feature (61)..(61): /note="Nucleotide may be methylated to form 5-methylcytosine"
tagctgtgtttacattatacaccagactgtgtgcctgtgctacagtcccgctgagtcatgcgggatgtttacctcagcctatgcctatgtggctgcagctcagccatgttccttacaatcat

SEQ ID NO: 23632 - DNA, 122 bp, Homo sapiens
  misc_feature (61)..(62): /note="This region represents a CpG dinucleotide"
  misc_feature (61)..(61): /note="Nucleotide may be methylated to form 5-methylcytosine"
tctcagggcgagccaaggttgcttcatgggggccatgagacttcagtatttccctttcgtcgcaaggcatgctggtggagatgacacacgggcagaaaagcttagtggttaagagtttgagc

SEQ ID NO: 23633 - DNA, 122 bp, Homo sapiens
  misc_feature (61)..(62): /note="This region represents a CpG dinucleotide"
  misc_feature (61)..(61): /note="Nucleotide may be methylated to form 5-methylcytosine"
aaggccatgccagtcaaaggtgatgtcatgcaccctataggtcactatgactcagtataccgtggcttgctctgataacctgactctggcagaacatcacatgatgattagcagactcctgg

SEQ ID NO: 23634 - DNA, 122 bp, Homo sapiens
  misc_feature (61)..(62): /note="This region represents a CpG dinucleotide"
  misc_feature (61)..(61): /note="Nucleotide may be methylated to form 5-methylcytosine"
acactgtcaaatctctttatttttctttcactcagctgattagttctcaccagacatttacgttggtctgtgcgacctcccctttctgtgctcatcctccaccttagaggtctacaccacat

SEQ ID NO: 23635 - DNA, 122 bp, Homo sapiens
  misc_feature (61)..(62): /note="This region represents a CpG dinucleotide"
  misc_feature (61)..(61): /note="Nucleotide may be methylated to form 5-methylcytosine"
tccccacccctcatggtggagaaagagcagtaatcatcctcgctctgcagctgtggaaagcgagcctcagaggaacagacaagcaccagcaaaggcaggacccaattgcaggctcaccacct

SEQ ID NO: 23636 - DNA, 122 bp, Homo sapiens
  misc_feature (61)..(62): /note="This region represents a CpG dinucleotide"
  misc_feature (61)..(61): /note="Nucleotide may be methylated to form 5-methylcytosine"
cacggtgtcccttggctcaggccagcacctccgtgatgcttccatgacatggggagaaaccgccaaccatgggccatgtacaccagatgggtccaggcccagatggcagttgagcccgaggc

SEQ ID NO: 23637 - DNA, 122 bp, Homo sapiens
  misc_feature (61)..(62): /note="This region represents a CpG dinucleotide"
  misc_feature (61)..(61): /note="Nucleotide may be methylated to form 5-methylcytosine"
gatggatgagagttcccagacaagggtgaccttttctttcacctcgtccagctagacagacgtggtggttccaaggccccttgtcatctgctgattgctttgtgattaatgtacaagtcact

SEQ ID NO: 23638 - DNA, 122 bp, Homo sapiens
  misc_feature (61)..(62): /note="This region represents a CpG dinucleotide"
  misc_feature (61)..(61): /note="Nucleotide may be methylated to form 5-methylcytosine"
ttatccctaagtaaatattttgtttcacagaaagcttgtccttttgtttttctgtgtacacgtgcgcactggcgcttgtgcgtgtatgtgtgtgtgcgtgcatgtgtcatttgctaccaggt

SEQ ID NO: 23639 - DNA, 122 bp, Homo sapiens
  misc_feature (61)..(62): /note="This region represents a CpG dinucleotide"
  misc_feature (61)..(61): /note="Nucleotide may be methylated to form 5-methylcytosine"
cattatgtggtgaggacaaatgcacctaaaaatagctcactggtctgattctttttctcccgcttcctggacagtagttacacattttgactctggcttttctgcactttggggtcctctag

SEQ ID NO: 23640 - DNA, 122 bp, Homo sapiens
  misc_feature (61)..(62): /note="This region represents a CpG dinucleotide"
  misc_feature (61)..(61): /note="Nucleotide may be methylated to form 5-methylcytosine"
caaattaaattatatttttatactacatcctcaaggactcttccctggaaatgaatgtttcgcaaaatgtcgctggcctcaagagcagtttccgtggactacacagttaccataggttgagc

SEQ ID NO: 23641 - DNA, 122 bp, Homo sapiens
  misc_feature (61)..(62): /note="This region represents a CpG dinucleotide"
  misc_feature (61)..(61): /note="Nucleotide may be methylated to form 5-methylcytosine"
tttcggtgggagttgcttgcacttctacttgtcactccatttgtccgtgtattaatgacacgcctgtacatccatccatccatcattcattaaaattgtgctgagcattttccatgtcccag

SEQ ID NO: 23642 - DNA, 122 bp, Homo sapiens
  misc_feature (61)..(62): /note="This region represents a CpG dinucleotide"
  misc_feature (61)..(61): /note="Nucleotide may be methylated to form 5-methylcytosine"
catggctgtgtggaatagcagaagggcccccgctggagatgtgggggtgctttccaactgcgctctgccagctttgaggctctgggcaagcacttccactctgggagcttcagcttcctcct

SEQ ID NO: 23643 - DNA, 122 bp, Homo sapiens
  misc_feature (61)..(62): /note="This region represents a CpG dinucleotide"
  misc_feature (61)..(61): /note="Nucleotide may be methylated to form 5-methylcytosine"
cttctcttaagggcagtcaggtgcattgggacctaatttctaagcatgtgaatagtgacacgtcgagcttacagcaggccttaggatcaccaggctgactcactgtcatacagattccaact

SEQ ID NO: 23644 - DNA, 122 bp, Homo sapiens
  misc_feature (61)..(62): /note="This region represents a CpG dinucleotide"
  misc_feature (61)..(61): /note="Nucleotide may be methylated to form 5-methylcytosine"
ggagatggaagtctatttcatgccttgtgtctaagaggctgttccctggggatagagatgcgcctcaaatgatgaactcagagccaagaacaaatgtgcgggagcaagaccagacaagctcc

SEQ ID NO: 23645 - DNA, 122 bp, Homo sapiens
  misc_feature (61)..(62): /note="This region represents a CpG dinucleotide"
  misc_feature (61)..(61): /note="Nucleotide may be methylated to form 5-methylcytosine"
gacctgccagggttgtatttccacaagccattatcctatgatgtgaataaactcacaacacgaaaatcagtgattacgtgtttctctgcagctctacctgtgtcttcaaaagcatcccactc

SEQ ID NO: 23646 - DNA, 122 bp, Homo sapiens
  misc_feature (61)..(62): /note="This region represents a CpG dinucleotide"
  misc_feature (61)..(61): /note="Nucleotide may be methylated to form 5-methylcytosine"
atttcccatcctcagaggtgactgtatcattctgttctcttatcaaatctgcaaatccttcgcctccactcaaagtttctggcttcacttgatatttctttgagaaaattaaaataattgga

SEQ ID NO: 23647 - DNA, 122 bp, Homo sapiens
  misc_feature (61)..(62): /note="This region represents a CpG dinucleotide"
  misc_feature (61)..(61): /note="Nucleotide may be methylated to form 5-methylcytosine"
cttcaatcacccagaagccaaccaggaactagaaacagaaagcttctgcagaactgatcacgactcatcagaggccgtgagagcaaggaaagaatcaggaactgccacaaattggaagagtc

SEQ ID NO: 23648 - DNA, 122 bp, Homo sapiens
  misc_feature (61)..(62): /note="This region represents a CpG dinucleotide"
  misc_feature (61)..(61): /note="Nucleotide may be methylated to form 5-methylcytosine"
ggaaattttctgagtcagagtatttgttaggttaattaggtgactcattatgggaccttacgcagattctgaatgggagttggtcactgaaaacacccaccatatgattgtgactagaggac

SEQ ID NO: 23649 - DNA, 122 bp, Homo sapiens
  misc_feature (61)..(62): /note="This region represents a CpG dinucleotide"
  misc_feature (61)..(61): /note="Nucleotide may be methylated to form 5-methylcytosine"
tcatggcatttcctttttccataattgttttaccttaagttgccacccagagataagcttcgcccacagtatatttctctaatgccaccagactggcatttttgtaattcaaatattctctt

SEQ ID NO: 23650 - DNA, 122 bp, Homo sapiens
  misc_feature (61)..(62): /note="This region represents a CpG dinucleotide"
  misc_feature (61)..(61): /note="Nucleotide may be methylated to form 5-methylcytosine"
aaatgggttcaatgtaattttgtaagcttttgaagatgcttacccttcccttgtgagacacgatacacattgtctccccttgtgcttagctttgtcctaatatgggaaacaatgataaccac

SEQ ID NO: 23651 - DNA, 122 bp, Homo sapiens
  misc_feature (61)..(62): /note="This region represents a CpG dinucleotide"
  misc_feature (61)..(61): /note="Nucleotide may be methylated to form 5-methylcytosine"
cctccccatccccctctccctgcctcgtgcaaatcccagcacgccgcccaccatatgcagcgatccctcactatcacacagagcccaacatctggcgggcgctcttgccgcaagatatgtgg

SEQ ID NO: 23652 - DNA, 122 bp, Homo sapiens
  misc_feature (61)..(62): /note="This region represents a CpG dinucleotide"
  misc_feature (61)..(61): /note="Nucleotide may be methylated to form 5-methylcytosine"
gctgtagtgagtgaagcctggcatttgggaagatgggtgtgtgggtgaccaaactcaccacgcaaggcccagagcccttttgaggccctcgaaggtcccaggctggggtcatcctctccagt

SEQ ID NO: 23653 - DNA, 122 bp, Homo sapiens
  misc_feature (61)..(62): /note="This region represents a CpG dinucleotide"
  misc_feature (61)..(61): /note="Nucleotide may be methylated to form 5-methylcytosine"
attgtgagttcaatttcagaccactgcaataaagagaacatttcaataaagtgagtcacacgaagactttggtttcccagtgcatataaatctatgtttacactgtactgtagtctattaag

SEQ ID NO: 23654 - DNA, 122 bp, Homo sapiens
  misc_feature (61)..(62): /note="This region represents a CpG dinucleotide"
  misc_feature (61)..(61): /note="Nucleotide may be methylated to form 5-methylcytosine"
agtagaaccataagaggttatgacttcccttgtggtcaccaggaggctgggctgagccggcgtaaatgatggcacttgctagggtcacagaaatgcatctttaagtgcattcaattacagac

SEQ ID NO: 23655 - DNA, 122 bp, Homo sapiens
  misc_feature (61)..(62): /note="This region represents a CpG dinucleotide"
  misc_feature (61)..(61): /note="Nucleotide may be methylated to form 5-methylcytosine"
tcacacaccagcctagccccagaggacagggtcttgagcctgtctctgaagcactgctcccgtctccatcctgactcatcctgagacacagttactgaatgtttactgtgggccaggctctc

SEQ ID NO: 23656 - DNA, 122 bp, Homo sapiens
  misc_feature (61)..(62): /note="This region represents a CpG dinucleotide"
  misc_feature (61)..(61): /note="Nucleotide may be methylated to form 5-methylcytosine"
tcctagggagtgttcaggatttctcagcgactgcctcacctcagcataatatttgtaatgcgtcttactttttacttttgagtttatttctttgaatagggtcaggaaaatccattaattaa

SEQ ID NO: 23657 - DNA, 122 bp, Homo sapiens
  misc_feature (61)..(62): /note="This region represents a CpG dinucleotide"
  misc_feature (61)..(61): /note="Nucleotide may be methylated to form 5-methylcytosine"
tagtttagattcccatttgacatctaaactgccagactttagactggtcatgaagtctctcgtgttgatttaatgaccagtttcctgtgatacttctaatattcctgccaaaggcttgagag

SEQ ID NO: 23658 - DNA, 122 bp, Homo sapiens
  misc_feature (61)..(62): /note="This region represents a CpG dinucleotide"
  misc_feature (61)..(61): /note="Nucleotide may be methylated to form 5-methylcytosine"
aattgacacacacactacctcccaactctccttccacaggccacctcctaatttttattacgtgtcactgggtagagtattgttctagtgcttctactggttctacatctaaatctttagct

SEQ ID NO: 23659 - DNA, 122 bp, Homo sapiens
  misc_feature (61)..(62): /note="This region represents a CpG dinucleotide"
  misc_feature (61)..(61): /note="Nucleotide may be methylated to form 5-methylcytosine"
agggtgagtccctgcgtgacctgattctctgtgggcaggccgggcagggtggctgcagggcggcggagcctgtgctgctggcctgcatttctctggctggacagatactgcgcccatatccc

SEQ ID NO: 23660 - DNA, 122 bp, Homo sapiens
  misc_feature (61)..(62): /note="This region represents a CpG dinucleotide"
  misc_feature (61)..(61): /note="Nucleotide may be methylated to form 5-methylcytosine"
gtctaatgaacatggcaggtatttgggactaagagcagaattatggtgcaagagcttacacgtagcatgggagtccaacagatgcagagtcagttccctgactcaccagctgaccttgggca

SEQ ID NO: 23661 - DNA, 122 bp, Homo sapiens
  misc_feature (61)..(62): /note="This region represents a CpG dinucleotide"
  misc_feature (61)..(61): /note="Nucleotide may be methylated to form 5-methylcytosine"
caagactcctccagctgtggctcaccactctggccaggcaggtggtgacgagagacaccacgccctacagggaggcccgtgggacttcggtaggccagtgatcctcaaactctgctgcatgt

SEQ ID NO: 23662 - DNA, 122 bp, Homo sapiens
  misc_feature (61)..(62): /note="This region represents a CpG dinucleotide"
  misc_feature (61)..(61): /note="Nucleotide may be methylated to form 5-methylcytosine"
tttgggtggatatttggagatgattctaacatgtttagaaaaaagcttattttagattaccggaaaactgttggtgatgcagactattaaaacttgaagtcactctaatgagtttctagttt

SEQ ID NO: 23663 - DNA, 122 bp, Homo sapiens
  misc_feature (61)..(62): /note="This region represents a CpG dinucleotide"
  misc_feature (61)..(61): /note="Nucleotide may be methylated to form 5-methylcytosine"
gttcaaaaggataaaacatgcctggcccgcgtctgcaggttctgataggatggctctggacgttgaggggttaatgcgctctctctctctctctctctctctctctctctctctctctctct

SEQ ID NO: 23664 - DNA, 122 bp, Homo sapiens
  misc_feature (61)..(62): /note="This region represents a CpG dinucleotide"
  misc_feature (61)..(61): /note="Nucleotide may be methylated to form 5-methylcytosine"
ccatataaagcagttagaagtgatcataagagcaatgtagagccctgaggggttaataaacgaagtaccatgaaaggacagggattttagaaagatttgtttggctgccttgtagataataa

SEQ ID NO: 23665 - DNA, 122 bp, Homo sapiens
  misc_feature (61)..(62): /note="This region represents a CpG dinucleotide"
  misc_feature (61)..(61): /note="Nucleotide may be methylated to form 5-methylcytosine"
tgcaacatattatgaatagctttccatgtggctgaatgtcatctcaaagcagctttgaaacggctgcagagtgctccatggtatgcaggtactagaatttatttcagtaattccctatggtt

SEQ ID NO: 23666 - DNA, 122 bp, Homo sapiens
  misc_feature (61)..(62): /note="This region represents a CpG dinucleotide"
  misc_feature (61)..(61): /note="Nucleotide may be methylated to form 5-methylcytosine"
cagttagcagcagcgcagatgccagcagactgggcggtgatgaagggcgattcactttcacgccgttttcagctaattaaatacaagatgagaataagagatcataatgtggtccctgatat

SEQ ID NO: 23667 - DNA, 122 bp, Homo sapiens
  misc_feature (61)..(62): /note="This region represents a CpG dinucleotide"
  misc_feature (61)..(61): /note="Nucleotide may be methylated to form 5-methylcytosine"
gtgtactctctgaggccccaagggaagggcctgcactccacctctctgccccgtttgctccgtgtatgcccctacaagaatgctcgcgtcttgccctcaggtggcatttttcaagtccgctg

SEQ ID NO: 23668 - DNA, 122 bp, Homo sapiens
  misc_feature (61)..(62): /note="This region represents a CpG dinucleotide"
  misc_feature (61)..(61): /note="Nucleotide may be methylated to form 5-methylcytosine"
ccgccagcccatccgcgaccgcatccagatcttcgtgtgagccgcgccgtccgccgcgcccgagctgccttcgcgtgcccccgccctgtgttttataaaaagaaagattctcggacgttgcc

SEQ ID NO: 23669 - DNA, 122 bp, Homo sapiens
  misc_feature (61)..(62): /note="This region represents a CpG dinucleotide"
  misc_feature (61)..(61): /note="Nucleotide may be methylated to form 5-methylcytosine"
aaatgaattggtcatcaaaaattagactttcctctcacctgtgcagctggctctgtcacgcggcctctgctgctcaccaccagcacatacctggcccaggagtggctgccagtcaatgcgca

SEQ ID NO: 23670 - DNA, 122 bp, Homo sapiens
  misc_feature (61)..(62): /note="This region represents a CpG dinucleotide"
  misc_feature (61)..(61): /note="Nucleotide may be methylated to form 5-methylcytosine"
ggcttgtgctgctgggtgtgggtggcgcgctacgggccttgtgctgctgggcctgggtggcgcgctacgggccgtgtgctgctgggcctgggtggcgcactacgggccttgtgctgctgggc

SEQ ID NO: 23671 - DNA, 122 bp, Homo sapiens
  misc_feature (61)..(62): /note="This region represents a CpG dinucleotide"
  misc_feature (61)..(61): /note="Nucleotide may be methylated to form 5-methylcytosine"
gcaagctaactggccacagtgcaagcccaaggggacgagggattccagactctggacacacggccgaaatagccaactgtgggctcctggctacagaggaggtgagtggagccaggagaaga

SEQ ID NO: 23672 - DNA, 122 bp, Homo sapiens
  misc_feature (61)..(62): /note="This region represents a CpG dinucleotide"
  misc_feature (61)..(61): /note="Nucleotide may be methylated to form 5-methylcytosine"
ggccgtgctttggagttcttatgagcatggcattcctgagaacttctctaactgcagcctcgggcatagaggctgggcagcaagtggcagcagcagaggactcctagaagccttctacttga

SEQ ID NO: 23673 - DNA, 122 bp, Homo sapiens
  misc_feature (61)..(62): /note="This region represents a CpG dinucleotide"
  misc_feature (61)..(61): /note="Nucleotide may be methylated to form 5-methylcytosine"
ggtctggcccagcctctgcctgtggaggggagtgtgcagaactgggagagcagctcctcacggagcccatggaagttcctgactgcagccgctcaaactcaagccacagccccatccctcag

SEQ ID NO: 23674 - DNA, 122 bp, Homo sapiens
  misc_feature (61)..(62): /note="This region represents a CpG dinucleotide"
  misc_feature (61)..(61): /note="Nucleotide may be methylated to form 5-methylcytosine"
tgcaaccaaatgtatcagtgataactgtggtttcagctacattgaagagtagccaaaaatcgaactgaccaaacttcagatctctcttggccttacttgaactcattcaatatatctgtgac

SEQ ID NO: 23675 - DNA, 122 bp, Homo sapiens
  misc_feature (61)..(62): /note="This region represents a CpG dinucleotide"
  misc_feature (61)..(61): /note="Nucleotide may be methylated to form 5-methylcytosine"
ccttacagggagaaactgacacaaaaagatggaatatagtgtagaaaatattagaaacttcgaggatcaatctatgatttgattaataggatttctaaacatagaaagctaaaaaaattgag

SEQ ID NO: 23676 - DNA, 122 bp, Homo sapiens
  misc_feature (61)..(62): /note="This region represents a CpG dinucleotide"
  misc_feature (61)..(61): /note="Nucleotide may be methylated to form 5-methylcytosine"
ctctatagctgtttgagtaacttctcttatccataaagctgtctgcataattcccccttgcgtatgtagttctgggtatgtctctaggcaggcacaatgtgcacttcttttgtttgtataaa

SEQ ID NO: 23677 - DNA, 122 bp, Homo sapiens
  misc_feature (61)..(62): /note="This region represents a CpG dinucleotide"
  misc_feature (61)..(61): /note="Nucleotide may be methylated to form 5-methylcytosine"
tatatcatggtccactggagagcacccctcaattgtggggaggccatgtatcatttctgccgtccctaagtatgaagaaaaacaagaagaagcacgccaggaactctctgaaccagaaaaaa

SEQ ID NO: 23678 - DNA, 122 bp, Homo sapiens
  misc_feature (61)..(62): /note="This region represents a CpG dinucleotide"
  misc_feature (61)..(61): /note="Nucleotide may be methylated to form 5-methylcytosine"
tatctacttcaaatatccatctttatgagtcattcttagttcttgagccacacagaaactcgtgatgggccagatttggttgtgggccaaaggtgaccaaaccctactctagttcattcatt

SEQ ID NO: 23679 - DNA, 122 bp, Homo sapiens
  misc_feature (61)..(62): /note="This region represents a CpG dinucleotide"
  misc_feature (61)..(61): /note="Nucleotide may be methylated to form 5-methylcytosine"
tcagttgctataaacacagcttcctcccaagactctgtttatatgtctgcttgtcaaccccgcgccagacactggcgctccctttttttaccgtcactgcaccctcatcctgtttataggac

SEQ ID NO: 23680 - DNA, 122 bp, Homo sapiens
  misc_feature (61)..(62): /note="This region represents a CpG dinucleotide"
  misc_feature (61)..(61): /note="Nucleotide may be methylated to form 5-methylcytosine"
tattagaggctgagtgtatgaacaaagcatctttcctgggattttaacattgtgagtgatcgagggtgctcttaaataagttcccccaagaagccctaatgttcctctggatgcatgattat

SEQ ID NO: 23681 - DNA, 122 bp, Homo sapiens
  misc_feature (61)..(62): /note="This region represents a CpG dinucleotide"
  misc_feature (61)..(61): /note="Nucleotide may be methylated to form 5-methylcytosine"
acaaccggcctaatttaacctaaatccagaaataatcccttaaattttgtagctcacaaacgcatcctccctctttccccacaacattccatcagactcagggaacgtcatcacacatcaac

SEQ ID NO: 23682 - DNA, 122 bp, Homo sapiens
  misc_feature (61)..(62): /note="This region represents a CpG dinucleotide"
  misc_feature (61)..(61): /note="Nucleotide may be methylated to form 5-methylcytosine"
tggcaaataagatttcactgtcttaacttccctgcacataataattcactcctttccttgcgctccagccaaactccaggtggttttgctatcacatttaaaacactgtctaagttactgca

SEQ ID NO: 23683 - DNA, 122 bp, Homo sapiens
  misc_feature (61)..(62): /note="This region represents a CpG dinucleotide"
  misc_feature (61)..(61): /note="Nucleotide may be methylated to form 5-methylcytosine"
gcatcccccaagtgttgcccttggctcttttccaataccattgtttcttttttatgttctcgctttcctgtgggtgacagattatggagttgtgggttgaattttgtctgccaaggacatat

SEQ ID NO: 23684 - DNA, 122 bp, Homo sapiens
  misc_feature (61)..(62): /note="This region represents a CpG dinucleotide"
  misc_feature (61)..(61): /note="Nucleotide may be methylated to form 5-methylcytosine"
gctagatttacccaggctatgtggtacagcctattgcttctaggctacaagcctgcatgtcgtgttactgtacagaatactgtaggcaattataacacaattgtaagtatttgtgtatctaa

SEQ ID NO: 23685 - DNA, 122 bp, Homo sapiens
  misc_feature (61)..(62): /note="This region represents a CpG dinucleotide"
  misc_feature (61)..(61): /note="Nucleotide may be methylated to form 5-methylcytosine"
cattcagcccaccaggctgtgctccttcccatgttgccatggagattgtattaaaagcaccggcttcagtttctaccatagtcttaaaagtacttccttttgtagttgaaaaccaaatactt

SEQ ID NO: 23686 - DNA, 122 bp, Homo sapiens
  misc_feature (61)..(62): /note="This region represents a CpG dinucleotide"
  misc_feature (61)..(61): /note="Nucleotide may be methylated to form 5-methylcytosine"
gcagcatagataatggttaaggaatgtggccattgcattcgattacctggattcaaattacgatacctacactaaaaagctgtgagactgtgaatcatggatttgacctctatctgcctcat

SEQ ID NO: 23687 - DNA, 122 bp, Homo sapiens
  misc_feature (61)..(62): /note="This region represents a CpG dinucleotide"
  misc_feature (61)..(61): /note="Nucleotide may be methylated to form 5-methylcytosine"
catcattaggtgacttcatcattgtgcaaccatcatagggtgcacttagacaaacctagacggtacagcctactatccacctaggctatacgttatagcctgttgctcctaggttacaaaca

SEQ ID NO: 23688 - DNA, 122 bp, Homo sapiens
  misc_feature (61)..(62): /note="This region represents a CpG dinucleotide"
  misc_feature (61)..(61): /note="Nucleotide may be methylated to form 5-methylcytosine"
gtcttgagcaactgtgaaagagacccaacagcattagtcaaaatagggactgttcctagacgacagcagtctcaagccccaaggcacgacgttacccattatgtggtagggagtaagggatt

SEQ ID NO: 23689 - DNA, 122 bp, Homo sapiens
  misc_feature (61)..(62): /note="This region represents a CpG dinucleotide"
  misc_feature (61)..(61): /note="Nucleotide may be methylated to form 5-methylcytosine"
acagagggacacaggcagcacaccccaaccggggcaggagggaagacggtaggtgggggccgccgtgcgatgtgtgtgcggcaaacatcacttggttaagtcacactggtactgcccattta

SEQ ID NO: 23690 - DNA, 122 bp, Homo sapiens
  misc_feature (61)..(62): /note="This region represents a CpG dinucleotide"
  misc_feature (61)..(61): /note="Nucleotide may be methylated to form 5-methylcytosine"
attccagcctgggcaacacagcaagaccctatctcaaaaccaatcaaccaaacaaacaaacgaaccaaacaaagatgtagctgtccacacgggaagctatatgaagtgagcttttgttttac

SEQ ID NO: 23691 - DNA, 122 bp, Homo sapiens
  misc_feature (61)..(62): /note="This region represents a CpG dinucleotide"
  misc_feature (61)..(61): /note="Nucleotide may be methylated to form 5-methylcytosine"
aacacattcatttgtttgacaaataccttcccaaaactattttaaaacacagctgctgggcgggacgcagtggctcacacctgtaatcccaggactttgggtggccgaggcgggtgaatcac

SEQ ID NO: 23692 - DNA, 122 bp, Homo sapiens
  misc_feature (61)..(62): /note="This region represents a CpG dinucleotide"
  misc_feature (61)..(61): /note="Nucleotide may be methylated to form 5-methylcytosine"
gtcttgagcagggatcgactttttttttttttaaggttccaacagatgatactgtggctacgatgggcagctcagatgtaggccactggcaacacagagtggaaggagaagcccacagggtt

SEQ ID NO: 23693 - DNA, 122 bp, Homo sapiens
  misc_feature (61)..(62): /note="This region represents a CpG dinucleotide"
  misc_feature (61)..(61): /note="Nucleotide may be methylated to form 5-methylcytosine"
gagcccgctggagccacctcccctcttgtgtcttcggcagtacatcatctcccaggccgacgggcagagattcaagttcacctccctgtgttccacttagtgattcatcaacccagcatctg

SEQ ID NO: 23694 - DNA, 122 bp, Homo sapiens
  misc_feature (61)..(62): /note="This region represents a CpG dinucleotide"
  misc_feature (61)..(61): /note="Nucleotide may be methylated to form 5-methylcytosine"
agctatttgagtgggttgtgggacaaaatgcagaatagtctaatcccagcttgggcatcgcgcagctccagaccctctgggcaagccctgtgcattcaacagcttttaggccacatcctatt

SEQ ID NO: 23695 - DNA, 122 bp, Homo sapiens
  misc_feature (61)..(62): /note="This region represents a CpG dinucleotide"
  misc_feature (61)..(61): /note="Nucleotide may be methylated to form 5-methylcytosine"
tccaacaacacagccagacttaaagaggtttgatgaaaggcgagtggctttgtttggaggcgctggtgctgggccctaggctcagtctgtggcatgcatgagaagctagtggcttatcaacg

SEQ ID NO: 23696 - DNA, 122 bp, Homo sapiens
  misc_feature (61)..(62): /note="This region represents a CpG dinucleotide"
  misc_feature (61)..(61): /note="Nucleotide may be methylated to form 5-methylcytosine"
aggacagagcacaaagcaatcaaaataatccaatggaaataagcaatcaaccctcttgcccgttatcctagcagagcctgtgggagacttgctgagagcctatttacacaaaggcagccctg

SEQ ID NO: 23697 - DNA, 122 bp, Homo sapiens
  misc_feature (61)..(62): /note="This region represents a CpG dinucleotide"
  misc_feature (61)..(61): /note="Nucleotide may be methylated to form 5-methylcytosine"
tagttatcattacccaccgagtttgtataatttggcaagaaaaggggcagataaatttaacgtggcatgtgcagatacgtttaaaaataaaatccaaactctgtgactaacatctctgtcaa

SEQ ID NO: 23698 - DNA, 122 bp, Homo sapiens
  misc_feature (61)..(62): /note="This region represents a CpG dinucleotide"
  misc_feature (61)..(61): /note="Nucleotide may be methylated to form 5-methylcytosine"
tgtggtaatgacagcatagaagactatgtgtctcctgctatgatgacagcatccttagagcgtggctcttcagtcatttttcctgatgtgatggtgattccagctgaccagtcactatagcc

SEQ ID NO: 23699 - DNA, 122 bp, Homo sapiens
  misc_feature (61)..(62): /note="This region represents a CpG dinucleotide"
  misc_feature (61)..(61): /note="Nucleotide may be methylated to form 5-methylcytosine"
ttaggtactaaggatacaatcatgagtaagatttaatctctgcccttgaagagttcatagcgtagtgggagaaaaaagaagttgcaaaaaagaacaacaaaagtgtaatagtaaaatgtacc

SEQ ID NO: 23700 - DNA, 122 bp, Homo sapiens
  misc_feature (61)..(62): /note="This region represents a CpG dinucleotide"
  misc_feature (61)..(61): /note="Nucleotide may be methylated to form 5-methylcytosine"
gtccaccacatccgtgaacttacccagaatctcgtgaccggaagctgcggagctggggttcgagccccacgggttctcctcctgcagtcctgccgtcctcgcagtggcatcctctttctgcg

SEQ ID NO: 23701 - DNA, 122 bp, Homo sapiens
  misc_feature (61)..(62): /note="This region represents a CpG dinucleotide"
  misc_feature (61)..(61): /note="Nucleotide may be methylated to form 5-methylcytosine"
ttcaatggtaacacaagaaaagaatgactcattccaacttttgcaatcagggaaagcttccggggaaccagtggagatctgctgcaaaacagggaaggaaaaaaataccaggaacatagtaa

SEQ ID NO: 23702 - DNA, 122 bp, Homo sapiens
  misc_feature (61)..(62): /note="This region represents a CpG dinucleotide"
  misc_feature (61)..(61): /note="Nucleotide may be methylated to form 5-methylcytosine"
tgtaaattaacttaattttgctgacttgactcctgtggcttctggacccctcctctgccccgcaggaggaagttccacggcaggtggtgcgttcccacgcaggcaccaagtggaagcttgca

SEQ ID NO: 23703 - DNA, 122 bp, Homo sapiens
  misc_feature (61)..(62): /note="This region represents a CpG dinucleotide"
  misc_feature (61)..(61): /note="Nucleotide may be methylated to form 5-methylcytosine"
atggctgggcagagccactctagcctctgtgggccgggcgggcgggtcggcaggttcacacgcttcagacgtgagtgtgagcaccctgcataatagggctttgtcccggctcctgggagcca

SEQ ID NO: 23704 - DNA, 122 bp, Homo sapiens
  misc_feature (61)..(62): /note="This region represents a CpG dinucleotide"
  misc_feature (61)..(61): /note="Nucleotide may be methylated to form 5-methylcytosine"
aggccattatcattctattggaggcagtccatttgcatttctatggacaactgtcatttacggagttgcacaagagctcaaagacaataaaagacagagattctgggtgcggtggcttggtg

SEQ ID NO: 23705 - DNA, 122 bp, Homo sapiens
  misc_feature (61)..(62): /note="This region represents a CpG dinucleotide"
  misc_feature (61)..(61): /note="Nucleotide may be methylated to form 5-methylcytosine"
aaaatttggtagctcatatcttaccatttgagctcggagatacatttgagcttggcttgccgttagggtaggggaagtactccctagtaacatagtctgttgggtaatactgccgctggtag

SEQ ID NO: 23706 - DNA, 122 bp, Homo sapiens
  misc_feature (61)..(62): /note="This region represents a CpG dinucleotide"
  misc_feature (61)..(61): /note="Nucleotide may be methylated to form 5-methylcytosine"
ggactgtcttgcagtattacagctctaagctacaaatgctttcctaaccacagaggtaaccgctatacagatactttgaaagacaaatgagaatgctgccacatgcaaggtcaatcacaaac

SEQ ID NO: 23707 - DNA, 122 bp, Homo sapiens
  misc_feature (61)..(62): /note="This region represents a CpG dinucleotide"
  misc_feature (61)..(61): /note="Nucleotide may be methylated to form 5-methylcytosine"
acaaagtctctgccctcaaggagggtacaggctgtcgaagtgacagtcatacaacaaatacgcagttaacaccaacagtgccagctggcataaactaagcgctcagctggagcactaagatg

SEQ ID NO: 23708 - DNA, 122 bp, Homo sapiens
  misc_feature (61)..(62): /note="This region represents a CpG dinucleotide"
  misc_feature (61)..(61): /note="Nucleotide may be methylated to form 5-methylcytosine"
atgacattgccacccacagattaggaacaaagacgctggagtcttaagtcctcttggagacgcaaggtcttcaaagcttgctggcaaatgtgatagtcgtgttctttgccagggcctagaga

SEQ ID NO: 23709 - DNA, 122 bp, Homo sapiens
  misc_feature (61)..(62): /note="This region represents a CpG dinucleotide"
  misc_feature (61)..(61): /note="Nucleotide may be methylated to form 5-methylcytosine"
tctccaacatcaacacctacaccacattagtcaaaccagtacagcaggccctactcccagcgcctcccaggtacctccagaagcatgctgggtccccacccagggagtccccacggctccgc

SEQ ID NO: 23710 - DNA, 122 bp, Homo sapiens
  misc_feature (61)..(62): /note="This region represents a CpG dinucleotide"
  misc_feature (61)..(61): /note="Nucleotide may be methylated to form 5-methylcytosine"
cctgccctggtcaccctagggctaggtacaagacaattagggacagcccctacctcctagcgccgtctgtaatgattcagactagctacttatcctaatcctgctcatcctgctgcaccttc

SEQ ID NO: 23711 - DNA, 122 bp, Homo sapiens
  misc_feature (61)..(62): /note="This region represents a CpG dinucleotide"
  misc_feature (61)..(61): /note="Nucleotide may be methylated to form 5-methylcytosine"
ttacagtcagtgctgtatcacctaagacttcaacagccagcagcaagtgaattaagaaaccgtaatatatcctccattcaatgcacccttgcagggttttgcacccctaaagagatccctag

SEQ ID NO: 23712 - DNA, 122 bp, Homo sapiens
  misc_feature (61)..(62): /note="This region represents a CpG dinucleotide"
  misc_feature (61)..(61): /note="Nucleotide may be methylated to form 5-methylcytosine"
tgttacatctgggcccccgacacgaatgtgcaagagccggacctctgcacctgtcagaggcggctcgcattacgaacctgctccacagtcctgtggattcctaactccgctcaagcggaaac

SEQ ID NO: 23713 - DNA, 122 bp, Homo sapiens
  misc_feature (61)..(62): /note="This region represents a CpG dinucleotide"
  misc_feature (61)..(61): /note="Nucleotide may be methylated to form 5-methylcytosine"
aaaaggaaatttgtattagaaactagaaggcttatgacaggtggtagcttgctttcttggcggagctcagataccttgaaataacattgtaaattcagataaggcttttcatgctttcttta

SEQ ID NO: 23714 - DNA, 122 bp, Homo sapiens
  misc_feature (61)..(62): /note="This region represents a CpG dinucleotide"
  misc_feature (61)..(61): /note="Nucleotide may be methylated to form 5-methylcytosine"
tgaaaattgagcaaaagcttgaagcaggtgatggagctggccaaggtgctgagggaagagcgttgtaggctgaatcaacaggataaaggcattaggagactccctggtgagtctgaggctct

SEQ ID NO: 23715 - DNA, 122 bp, Homo sapiens
  misc_feature (61)..(62): /note="This region represents a CpG dinucleotide"
  misc_feature (61)..(61): /note="Nucleotide may be methylated to form 5-methylcytosine"
atctttaataccacagccatttcctgaaaatgtatagctttgcaaaagtcttgtcacttccgaaggcttcagaaatgctgatttggaggagttcctatcattaggaatgggacccaggtagt

SEQ ID NO: 23716 - DNA, 122 bp, Homo sapiens
  misc_feature (61)..(62): /note="This region represents a CpG dinucleotide"
  misc_feature (61)..(61): /note="Nucleotide may be methylated to form 5-methylcytosine"
gggacagctgacccaagggccctactgcatgggtcgcacggttcagccagtccttgctggcgggacctgcatccccatcctactggctggcagagtaggactggtttcctgggacatctcca

SEQ ID NO: 23717 - DNA, 122 bp, Homo sapiens
  misc_feature (61)..(62): /note="This region represents a CpG dinucleotide"
  misc_feature (61)..(61): /note="Nucleotide may be methylated to form 5-methylcytosine"
cagcatggtacttcttatcacacatggagtccacacacctgatgccaagtctccagttggcgcttgtccttaggccacactgccacccacaagagactcagggcgcaggggcaaacaagcca

SEQ ID NO: 23718 - DNA, 122 bp, Homo sapiens
  misc_feature (61)..(62): /note="This region represents a CpG dinucleotide"
  misc_feature (61)..(61): /note="Nucleotide may be methylated to form 5-methylcytosine"
atgttgggcaatttgacattgaggaacttgtgacactggtggaactatctagggtgtagtcgggcatataaatctggggtctggatatacgcatgtgaaaaataaagtcccctgtgagaaat

SEQ ID NO: 23719 - DNA, 122 bp, Homo sapiens
  misc_feature (61)..(62): /note="This region represents a CpG dinucleotide"
  misc_feature (61)..(61): /note="Nucleotide may be methylated to form 5-methylcytosine"
tgtctttttcttctaccaagattcctcacccctaggagacgttggttaatataggcatttcggtttggttaatctgatcatgagtgcccgtgagcatggcatgaggcatgattgaagcagtt

SEQ ID NO: 23720 - DNA, 122 bp, Homo sapiens
  misc_feature (61)..(62): /note="This region represents a CpG dinucleotide"
  misc_feature (61)..(61): /note="Nucleotide may be methylated to form 5-methylcytosine"
actgtgttgcctttccacctgcctaaaagaagcagcttagggtcatgactcagggagaggcggttagacaagtccaataatacaacttgtttaggggatggagggacccagcctgaggccct

SEQ ID NO: 23721 - DNA, 122 bp, Homo sapiens
  misc_feature (61)..(62): /note="This region represents a CpG dinucleotide"
  misc_feature (61)..(61): /note="Nucleotide may be methylated to form 5-methylcytosine"
cccaactaggatccgctccaggcttccatcatccatgcccttccctaaccaccggccacacgggaacctgaagatcagacaatggactgtcagagcagccagctcctccctgctgctcacag

SEQ ID NO: 23722 - DNA, 122 bp, Homo sapiens
  misc_feature (61)..(62): /note="This region represents a CpG dinucleotide"
  misc_feature (61)..(61): /note="Nucleotide may be methylated to form 5-methylcytosine"
gcctgtcttccctccttctccactctcctaccccctgtaaatgactgctacatacaactacgacactaaagtggaaggaaaaactgtcatgctgaaccacagctctcccaaatttgtgacat

SEQ ID NO: 23723 - DNA, 122 bp, Homo sapiens
  misc_feature (61)..(62): /note="This region represents a CpG dinucleotide"
  misc_feature (61)..(61): /note="Nucleotide may be methylated to form 5-methylcytosine"
aggcagcaactgtgattccagcatcccagcccagcccagatgcacggtggctgaaaaccacgcctcaagctccgggggaactccctggctattcttggaaacacagagactcctggctccct

SEQ ID NO: 23724 - DNA, 122 bp, Homo sapiens
  misc_feature (61)..(62): /note="This region represents a CpG dinucleotide"
  misc_feature (61)..(61): /note="Nucleotide may be methylated to form 5-methylcytosine"
cagaaacacaagcttttttaacacttctgggcaaaagccagtgtttcagataaacacacccgtggctgcttcatctgtaaattatgctttcttaaggccttcactttgttaaggcagtctat

SEQ ID NO: 23725 - DNA, 122 bp, Homo sapiens
  misc_feature (61)..(62): /note="This region represents a CpG dinucleotide"
  misc_feature (61)..(61): /note="Nucleotide may be methylated to form 5-methylcytosine"
attgtatgctccatgacaatgatgacagcaactaatgacacatttcccagatcatatcctcgtcattaagtgacacgtgactgtagcataatatgtaaacaatactaatttaatcaaaaatt

SEQ ID NO: 23726 - DNA, 122 bp, Homo sapiens
  misc_feature (61)..(62): /note="This region represents a CpG dinucleotide"
  misc_feature (61)..(61): /note="Nucleotide may be methylated to form 5-methylcytosine"
catgacctgctgaagatagtatagctctgggggtcaaatcaagacctaaaccaggccaggcgcggtcagacgtggtggctcacgcctgtaatcccaacactttgagaggccaaggcaggtga

SEQ ID NO: 23727 - DNA, 122 bp, Homo sapiens
  misc_feature (61)..(62): /note="This region represents a CpG dinucleotide"
  misc_feature (61)..(61): /note="Nucleotide may be methylated to form 5-methylcytosine"
agtacacatggtaggggaggagccagggcgactcaggagtgccacgcacctgctctagagcggcagctgtcccagtccctgctgtggaagtgggggacagggccctctcctgggggccattg

SEQ ID NO: 23728 - DNA, 122 bp, Homo sapiens
  misc_feature (61)..(62): /note="This region represents a CpG dinucleotide"
  misc_feature (61)..(61): /note="Nucleotide may be methylated to form 5-methylcytosine"
ctcagtaagcaaacttacctgaggccaggttgttgcacaagacgagatcattgcacaagacgaggttgcataagatgatgtcgtgtcacggtgaggtttctgctggtgaggagtgtggctgc

SEQ ID NO: 23729 - DNA, 122 bp, Homo sapiens
  misc_feature (61)..(62): /note="This region represents a CpG dinucleotide"
  misc_feature (61)..(61): /note="Nucleotide may be methylated to form 5-methylcytosine"
ttaaatccccacaaggaagcaatcgagtcacaattgctaatcctcttgtaagaataagagcgcggagtgtagctggcagattatattgcctgctgtcacgtaacttgtaatagtgaagccag

SEQ ID NO: 23730 - DNA, 122 bp, Homo sapiens
  misc_feature (61)..(62): /note="This region represents a CpG dinucleotide"
  misc_feature (61)..(61): /note="Nucleotide may be methylated to form 5-methylcytosine"
tcacagaaaattcaggttcggtaggaagcagccgaagtcactcaggtagttctagacaaccgaaatgcagatttttttgcctggctccaatctccagacttttccattaggcagtgtttata

SEQ ID NO: 23731 - DNA, 122 bp, Homo sapiens
  misc_feature (61)..(62): /note="This region represents a CpG dinucleotide"
  misc_feature (61)..(61): /note="Nucleotide may be methylated to form 5-methylcytosine"
tccactgttgtgactacacacacaagcccgggacacccacttgttagctcaggaaccaggcggccagcagatatctgctcagatgaacgtccagagactcaatcctctggcattctcaggtt

SEQ ID NO: 23732 - DNA, 122 bp, Homo sapiens
  misc_feature (61)..(62): /note="This region represents a CpG dinucleotide"
  misc_feature (61)..(61): /note="Nucleotide may be methylated to form 5-methylcytosine"
gagccccggccccacgtggcagctccccacgtgctcgtcccgtcctccttttctctttcccgagtcaccaccagtgaatgctgcccatgccctcaggtcgaccacggagctgcgcaaggaaa

SEQ ID NO: 23733 - DNA, 122 bp, Homo sapiens
  misc_feature (61)..(62): /note="This region represents a CpG dinucleotide"
  misc_feature (61)..(61): /note="Nucleotide may be methylated to form 5-methylcytosine"
taacctcccaatggggcaagattactcaccatgacgggcagctcagtgcatggcaacaagcgtatgctctgctgggcagccttcttggctggaaaactggctcgtgattctgactgtgactc

SEQ ID NO: 23734 - DNA, 122 bp, Homo sapiens
  misc_feature (61)..(62): /note="This region represents a CpG dinucleotide"
  misc_feature (61)..(61): /note="Nucleotide may be methylated to form 5-methylcytosine"
gaatgactgattcattctttatttccagcagtaatgtgtgaagattagtaattccccacacgcttgtcaacatttgttattattattattattattttctttaagagagtttcactcttgtt

SEQ ID NO: 23735 - DNA, 122 bp, Homo sapiens
  misc_feature (61)..(62): /note="This region represents a CpG dinucleotide"
  misc_feature (61)..(61): /note="Nucleotide may be methylated to form 5-methylcytosine"
ttaagccagagctgtgccacgtgcctctcgggagactgtggcctttagccctcacaacagcgtggtcaggcagggacggtaattatccctgtcccagcgcaactggcgtgatctcaggagac

SEQ ID NO: 23736 - DNA, 122 bp, Homo sapiens
  misc_feature (61)..(62): /note="This region represents a CpG dinucleotide"
  misc_feature (61)..(61): /note="Nucleotide may be methylated to form 5-methylcytosine"
aatataaatattttaggacttttggaccatatgatctctgttacaactatctgactctcccgttgggtccaaagcagctatacacaatacataaacaaacgaacatggctatgttccaacca

SEQ ID NO: 23737 - DNA, 122 bp, Homo sapiens
  misc_feature (61)..(62): /note="This region represents a CpG dinucleotide"
  misc_feature (61)..(61): /note="Nucleotide may be methylated to form 5-methylcytosine"
gtgattcagaaagggcgaacttgagtaacttgggcaaatgcccagagaaattgaatattacgtaaatgtgaccatctgcaattgaggtttgagcagtgcctgatgctacacacccttgggac

SEQ ID NO: 23738 - DNA, 122 bp, Homo sapiens
  misc_feature (61)..(62): /note="This region represents a CpG dinucleotide"
  misc_feature (61)..(61): /note="Nucleotide may be methylated to form 5-methylcytosine"
caccacagcccctgtaaccagccaacaaattcgagttaaatgcctattctttgtcccacacgtattagttacagagagtggagaacaagtggcagatagaggctgagggaagccaacccact

SEQ ID NO: 23739 - DNA, 122 bp, Homo sapiens
  misc_feature (61)..(62): /note="This region represents a CpG dinucleotide"
  misc_feature (61)..(61): /note="Nucleotide may be methylated to form 5-methylcytosine"
agatgatcccagaaagcaccattaggggattgagggaatgagacagagaagagaagcctgcggaaacaggaagtattatccagcaagttactactgtggacaactggagcacaatcccatca

SEQ ID NO: 23740 - DNA, 122 bp, Homo sapiens
  misc_feature (61)..(62): /note="This region represents a CpG dinucleotide"
  misc_feature (61)..(61): /note="Nucleotide may be methylated to form 5-methylcytosine"
tgttgatgcacatgattaaaaagccaggggcatgctcagagcaggagtacaaaaagcagacgtttctccctcaagggagctgtctccagtgacccaagactgccatcatgctgggatctgtg

SEQ ID NO: 23741 - DNA, 122 bp, Homo sapiens
  misc_feature (61)..(62): /note="This region represents a CpG dinucleotide"
  misc_feature (61)..(61): /note="Nucleotide may be methylated to form 5-methylcytosine"
cagtttcaatgacgtatgtgccaaaaattgaccactaggtagcaccataatctagctctacgactctagcactgtgttgattctgtattggccaggatgcaaacgttttaagatttatgtct

SEQ ID NO: 23742 - DNA, 122 bp, Homo sapiens
  misc_feature (61)..(62): /note="This region represents a CpG dinucleotide"
  misc_feature (61)..(61): /note="Nucleotide may be methylated to form 5-methylcytosine"
gggaagggcctctgggtggagcaatcccacactagcctatgttcagtagggaatgtgtcacggcacagtggcacaggcaagcaacctaaggatgttgaagcttcttgggtcaggtctccaaa

SEQ ID NO: 23743 - DNA, 122 bp, Homo sapiens
  misc_feature (61)..(62): /note="This region represents a CpG dinucleotide"
  misc_feature (61)..(61): /note="Nucleotide may be methylated to form 5-methylcytosine"
catggccttgccagatttccagcttccagcctgcaggatgctgagacagtaaatcctcaccgttttaagccaccaagtttgtggtgatctgttacagcagcttcagtaaacacatacaacct

SEQ ID NO: 23744 - DNA, 122 bp, Homo sapiens
  misc_feature (61)..(62): /note="This region represents a CpG dinucleotide"
  misc_feature (61)..(61): /note="Nucleotide may be methylated to form 5-methylcytosine"
cactgcttcacaagaacacagcatgccatagcttgcaaagtactctcagatatgctaattcgatcttcagcataaactggaaacataggcaggatgtgacgttttcttcattttacgggtga

SEQ ID NO: 23745 - DNA, 122 bp, Homo sapiens
  misc_feature (61)..(62): /note="This region represents a CpG dinucleotide"
  misc_feature (61)..(61): /note="Nucleotide may be methylated to form 5-methylcytosine"
aaagttaaatattgatttctggcacatagttctcaaccaatagttgttagcttttatcaccgttgttactactactaccattttaagaaatgaataacaaaacttgtaataagttgtaaaat

SEQ ID NO: 23746 - DNA, 122 bp, Homo sapiens
  misc_feature (61)..(62): /note="This region represents a CpG dinucleotide"
  misc_feature (61)..(61): /note="Nucleotide may be methylated to form 5-methylcytosine"
ctaggcaaccattagccaaaggtgatgagagccgggttctgggaaggacagcaggctgtgcggggtgacctcagactggacagaaggctgtgactaactttattggcatctctctagagaca

SEQ ID NO: 23747 - DNA, 122 bp, Homo sapiens
  misc_feature (61)..(62): /note="This region represents a CpG dinucleotide"
  misc_feature (61)..(61): /note="Nucleotide may be methylated to form 5-methylcytosine"
aaggggagcacaggaagctgatactcagacctctaatacagcttcttagccaaaattgtgcgctgtcttctttttactgtttccaaatccacaaacagatgggtgtgcaaagctttatttct

SEQ ID NO: 23748 - DNA, 122 bp, Homo sapiens
  misc_feature (61)..(62): /note="This region represents a CpG dinucleotide"
  misc_feature (61)..(61): /note="Nucleotide may be methylated to form 5-methylcytosine"
atttattgagcactacgtatatatttttgaattcccacaaccctggaagaatgagaaaatcgagactcagggagcgttaagtattttgcccaactgcatacgataaatacataggaaaaaca

SEQ ID NO: 23749 - DNA, 122 bp, Homo sapiens
  misc_feature (61)..(62): /note="This region represents a CpG dinucleotide"
  misc_feature (61)..(61): /note="Nucleotide may be methylated to form 5-methylcytosine"
tctctttccctgccacagtgacctcaaaggccccatcccagaaggcacagccacaaaaaacgtggcctccaccagcatggatccctgaatgtaatgggatcagagcctcctgcccacacctg

SEQ ID NO: 23750 - DNA, 122 bp, Homo sapiens
  misc_feature (61)..(62): /note="This region represents a CpG dinucleotide"
  misc_feature (61)..(61): /note="Nucleotide may be methylated to form 5-methylcytosine"
ctggatgatgcctccgacgagtacaagatcatcatgctcaaccggcgccacctcagcttccgagtcatcaaggttgggccggccccacctgccctaagccctgccccaaacccccttgggcc

SEQ ID NO: 23751 - DNA, 122 bp, Homo sapiens
  misc_feature (61)..(62): /note="This region represents a CpG dinucleotide"
  misc_feature (61)..(61): /note="Nucleotide may be methylated to form 5-methylcytosine"
aggagggagtgagtcatctgagtctgtgaagaattttctaagcaaggcgagcagcaagcacgaaggctctcaggaaggagtgtgcttggtgagttctaagaacaagcaggccagtgtagctg

SEQ ID NO: 23752 - DNA, 122 bp, Homo sapiens
  misc_feature (61)..(62): /note="This region represents a CpG dinucleotide"
  misc_feature (61)..(61): /note="Nucleotide may be methylated to form 5-methylcytosine"
ccccagtgtggcctcctggttccctccccacaggcgcccctctgggggttggagggctgacgcacaccctgcctgagatcccagccgcctggaagctgataaggagccctggcctcattaca

SEQ ID NO: 23753 - DNA, 122 bp, Homo sapiens
  misc_feature (61)..(62): /note="This region represents a CpG dinucleotide"
  misc_feature (61)..(61): /note="Nucleotide may be methylated to form 5-methylcytosine"
aagtgactgtgaagctggtcagccctgaggctcatgcttagcctggttctgatggcctctcgtaggctgccacatcctgctcgctacacaaaggcatttgaccagaaagcctgctctgcctg

SEQ ID NO: 23754 - DNA, 122 bp, Homo sapiens
  misc_feature (61)..(62): /note="This region represents a CpG dinucleotide"
  misc_feature (61)..(61): /note="Nucleotide may be methylated to form 5-methylcytosine"
ctccttcctcccccacttcctccccatcctcaaacctgccccaactctcctggaatacctcggcctgatcagcaggatttccacccctaagcccatcaagacagcaagaaatgtccagctgg

SEQ ID NO: 23755 - DNA, 122 bp, Homo sapiens
  misc_feature (61)..(62): /note="This region represents a CpG dinucleotide"
  misc_feature (61)..(61): /note="Nucleotide may be methylated to form 5-methylcytosine"
tatggcatcacactcccagtatctgtttgattctagatgcccaaggccatgtgagtcacacgtgttaggtaaagcagcatataggaaatggaaatggaagttagggtctagtgggagttagg

SEQ ID NO: 23756 - DNA, 122 bp, Homo sapiens
  misc_feature (61)..(62): /note="This region represents a CpG dinucleotide"
  misc_feature (61)..(61): /note="Nucleotide may be methylated to form 5-methylcytosine"
ctgtggcaaaaggaaatgcttaaacactccagcagcatctttagaggctggctctaaaagcggagtttggatatttaccagaaacatgcaaactgctgtggaaaaggaacggaaagagctgc

SEQ ID NO: 23757 - DNA, 122 bp, Homo sapiens
  misc_feature (61)..(62): /note="This region represents a CpG dinucleotide"
  misc_feature (61)..(61): /note="Nucleotide may be methylated to form 5-methylcytosine"
caaattcttccagtggttggtccctgtgcatctgttaatcagttcactcacagcagagcacgtagttacactgtctctttgtcctccacctgacattttatagaagtgaacaatcgaaagaa

SEQ ID NO: 23758 - DNA, 122 bp, Homo sapiens
  misc_feature (61)..(62): /note="This region represents a CpG dinucleotide"
  misc_feature (61)..(61): /note="Nucleotide may be methylated to form 5-methylcytosine"
tgctagagctagactcatttcccctgattctgttgcttccccacttggcaattgtcaccacgtatttttcaaaatgagaagtgagagtgcttgctcagaagaatgaagtaacttgagtcggt

SEQ ID NO: 23759 - DNA, 122 bp, Homo sapiens
  misc_feature (61)..(62): /note="This region represents a CpG dinucleotide"
  misc_feature (61)..(61): /note="Nucleotide may be methylated to form 5-methylcytosine"
tcataaacccaccatctactttgcagttctcaagagttgcttctcttaaactggtgaggacgcggctaagccctggaaatgagtccagattctcacggtggcccataaacactgctgtttcc

SEQ ID NO: 23760 - DNA, 122 bp, Homo sapiens
  misc_feature (61)..(62): /note="This region represents a CpG dinucleotide"
  misc_feature (61)..(61): /note="Nucleotide may be methylated to form 5-methylcytosine"
ctggaaacaggaacggaaacaggaaaggttcccttgtccccgtcgcagggcgtgtgacagcgggaatagctcgttttttcagaatcccactgctcaaacctctagggggagcctgctgacgg

SEQ ID NO: 23761 - DNA, 122 bp, Homo sapiens
  misc_feature (61)..(62): /note="This region represents a CpG dinucleotide"
  misc_feature (61)..(61): /note="Nucleotide may be methylated to form 5-methylcytosine"
tatatctatacctgtgtcacacttgcctccttatttctcaaacacaccctcttggctgggcgtggtgtctcacgcctgtaatcccagcactttgggagaccgagactggcaggtcacttgag

SEQ ID NO: 23762 - DNA, 122 bp, Homo sapiens
  misc_feature (61)..(62): /note="This region represents a CpG dinucleotide"
  misc_feature (61)..(61): /note="Nucleotide may be methylated to form 5-methylcytosine"
cctgtgtcctacattcccaggtgctacacaaagttttcagaccacatgactttttcccaacgagtggccaacttccttgttaatttgttggagccctatctattttattgtctgttttcaaa

SEQ ID NO: 23763 - DNA, 122 bp, Homo sapiens
  misc_feature (61)..(62): /note="This region represents a CpG dinucleotide"
  misc_feature (61)..(61): /note="Nucleotide may be methylated to form 5-methylcytosine"
tatatatctatccacataaatagagatgacaaaatataaaaaatttggtcgtcatccttccgtagtctgggaactgcagtgtggaaattcaatacaaaggatctgttttctgaagcatctgg

SEQ ID NO: 23764 - DNA, 122 bp, Homo sapiens
  misc_feature (61)..(62): /note="This region represents a CpG dinucleotide"
  misc_feature (61)..(61): /note="Nucleotide may be methylated to form 5-methylcytosine"
tccactcaggactcacatgctaatctccttggaaaacaccgtagagacacacaccaagatcgtgctttaacaggtttccaggtattccttaagccggacaagtgtgatgacagttaatcatc

SEQ ID NO: 23765 - DNA, 122 bp, Homo sapiens
  misc_feature (61)..(62): /note="This region represents a CpG dinucleotide"
  misc_feature (61)..(61): /note="Nucleotide may be methylated to form 5-methylcytosine"
agataagggctcctttcaggcctttccttgagctgcacgtgaacctgtgtgggcaggcagcgtttgcaggcgtgtttacgggcaggcagcgtttgcaggcgtgtttaccggcaggcagcgtt

SEQ ID NO: 23766 - DNA, 122 bp, Homo sapiens
  misc_feature (61)..(62): /note="This region represents a CpG dinucleotide"
  misc_feature (61)..(61): /note="Nucleotide may be methylated to form 5-methylcytosine"
ctcattcccctaaatgcagcttctgacaccttctagctacgagttcttgggctcctccttcgtgacttccttttaagataatttctgagttacaacaaatcagcatttgaagaaatgcagca

SEQ ID NO: 23767 - DNA, 122 bp, Homo sapiens
  misc_feature (61)..(62): /note="This region represents a CpG dinucleotide"
  misc_feature (61)..(61): /note="Nucleotide may be methylated to form 5-methylcytosine"
ggtagagtctaagttgtttccggtctgagccttcaagttgctgggctgtccttggcgtggcgagtcccaggagaaccagtgagacaagactggtggttctcaaagactcatatgtcccttac

SEQ ID NO: 23768 - DNA, 122 bp, Homo sapiens
  misc_feature (61)..(62): /note="This region represents a CpG dinucleotide"
  misc_feature (61)..(61): /note="Nucleotide may be methylated to form 5-methylcytosine"
tgcaatcttcttcccacaccaaccccactctctctgccccaagcaagatgactatgcaaacgagagaaggcctaggatctcaagtcccagtgactcacctgccagctctaggcatacatata

SEQ ID NO: 23769 - DNA, 122 bp, Homo sapiens
  misc_feature (61)..(62): /note="This region represents a CpG dinucleotide"
  misc_feature (61)..(61): /note="Nucleotide may be methylated to form 5-methylcytosine"
tgtctgttttgtgatgactaacctggtgatgtcagaggcccaacattttaatattttcaacggatgaaatatggcatagaatttagagaaagtcataagtcatagatgggtttaaaaataag

SEQ ID NO: 23770 - DNA, 122 bp, Homo sapiens
  misc_feature (61)..(62): /note="This region represents a CpG dinucleotide"
  misc_feature (61)..(61): /note="Nucleotide may be methylated to form 5-methylcytosine"
accatttccctgtttctttcttctcacttcctcctttccccttctgaccatcttttcagccgtgaacataccacaccagcaagaacaataagagccaagggtctgaattgtttaatcaaagg

SEQ ID NO: 23771 - DNA, 122 bp, Homo sapiens
  misc_feature (61)..(62): /note="This region represents a CpG dinucleotide"
  misc_feature (61)..(61): /note="Nucleotide may be methylated to form 5-methylcytosine"
ctaactatgtttgttttggcagatacgtgggtgactctcgcattggcagacatccatatccgtatttatggcaaatatgtcagcatttaatccatcccagtgtctgtgaaggaatcaacaat

SEQ ID NO: 23772 - DNA, 122 bp, Homo sapiens
  misc_feature (61)..(62): /note="This region represents a CpG dinucleotide"
  misc_feature (61)..(61): /note="Nucleotide may be methylated to form 5-methylcytosine"
aagctacctttataagataaccagttccagagtaaaagagtaaatactgactgcatgatgcgataaaagactagcaatgtggggaaccagtacagcaaaccatatgattaagaggagggatc

SEQ ID NO: 23773 - DNA, 122 bp, Homo sapiens
  misc_feature (61)..(62): /note="This region represents a CpG dinucleotide"
  misc_feature (61)..(61): /note="Nucleotide may be methylated to form 5-methylcytosine"
tctattcatatctattctggctaacttccaatctgtttgctccagttttagtgattgttccgtaatgcaaacctgatcatgtcacccttgcttaaatatctttagtacagataaacccactt

SEQ ID NO: 23774 - DNA, 122 bp, Homo sapiens
  misc_feature (61)..(62): /note="This region represents a CpG dinucleotide"
  misc_feature (61)..(61): /note="Nucleotide may be methylated to form 5-methylcytosine"
ctaggtactatggtcactacctgagtgacagattcatctgtacaccaaacctcagcattacgcaatataccttcgtaacaaacctgcacttgtacttccttattcaaaaataaaagttgaaa

SEQ ID NO: 23775 - DNA, 122 bp, Homo sapiens
  misc_feature (61)..(62): /note="This region represents a CpG dinucleotide"
  misc_feature (61)..(61): /note="Nucleotide may be methylated to form 5-methylcytosine"
cttcatttgtggctagtattgcaccccttcagtgtggcaatgtggttctgtcaccagaaacgctgactggcaacttctgtatggttgcaaaaccgggactggattcactgagactgattcct

SEQ ID NO: 23776 - DNA, 122 bp, Homo sapiens
  misc_feature (61)..(62): /note="This region represents a CpG dinucleotide"
  misc_feature (61)..(61): /note="Nucleotide may be methylated to form 5-methylcytosine"
agcctgtccctgcattgagagcaaatacgctccctgcaagcaaaaactctacttaaaaggcgaaggacttcagcttagagaatttgaaataactggattgtaactgggtttgcacaaggtta

SEQ ID NO: 23777 - DNA, 122 bp, Homo sapiens
  misc_feature (61)..(62): /note="This region represents a CpG dinucleotide"
  misc_feature (61)..(61): /note="Nucleotide may be methylated to form 5-methylcytosine"
ggaaggtgtggctgcctcatcttggcatgccagctactgagagcagtcggaatgggtgcccgcacttgggtttggactctgtcatgtggtgttggctttgctggggatgttgtctgctggtc

SEQ ID NO: 23778 - DNA, 122 bp, Homo sapiens
  misc_feature (61)..(62): /note="This region represents a CpG dinucleotide"
  misc_feature (61)..(61): /note="Nucleotide may be methylated to form 5-methylcytosine"
gagtgagagagcgtggtatgagagtgtgtgtttgcattcatatgtgcccacacaagcactcgtacatacgagggactcagctggaaaggggacaggtggcttttaaaagcccaagctcatat

SEQ ID NO: 23779 - DNA, 122 bp, Homo sapiens
  misc_feature (61)..(62): /note="This region represents a CpG dinucleotide"
  misc_feature (61)..(61): /note="Nucleotide may be methylated to form 5-methylcytosine"
catcacaagtttcagcatatccagagcaaagatgagcaggtgcttggagcaggggtagaacggggacaatcctgctcttgccgtagacagaaagtggtgctttgacctcctcgtcctgttgc

SEQ ID NO: 23780 - DNA, 122 bp, Homo sapiens
  misc_feature (61)..(62): /note="This region represents a CpG dinucleotide"
  misc_feature (61)..(61): /note="Nucleotide may be methylated to form 5-methylcytosine"
taaatggcattaggaaagctagttggcctcaccagcctcagtttcctggggataataatccgtgctcctcggaagctgttgagaagactgaatgagaggcctacatttgtagctcagaacct

SEQ ID NO: 23781 - DNA, 122 bp, Homo sapiens
  misc_feature (61)..(62): /note="This region represents a CpG dinucleotide"
  misc_feature (61)..(61): /note="Nucleotide may be methylated to form 5-methylcytosine"
tttaggccaaaagccctagatggtgaaggcctgtcaaagatgacatttgtcttcctcccacgccccatatccaatctatctgcagatcatgttgactgtgctgtaaaatatatcctgagtct

SEQ ID NO: 23782 - DNA, 122 bp, Homo sapiens
  misc_feature (61)..(62): /note="This region represents a CpG dinucleotide"
  misc_feature (61)..(61): /note="Nucleotide may be methylated to form 5-methylcytosine"
tctgagggccacaggaacataagtaacactgaagagtgaggctgatccctggggtttgcgcgagcctgcaaatgcatgattcaacagcactcgcctggtgcctctgggaggcaagctggatg

SEQ ID NO: 23783 - DNA, 122 bp, Homo sapiens
  misc_feature (61)..(62): /note="This region represents a CpG dinucleotide"
  misc_feature (61)..(61): /note="Nucleotide may be methylated to form 5-methylcytosine"
gctatgactagcctgctagtcagccctccagctgaccacagacacaagagcaagccaagccgagattagctgagtccagcccaggtttacagaaccacctagctgacctatagatttgtgag

SEQ ID NO: 23784 - DNA, 122 bp, Homo sapiens
  misc_feature (61)..(62): /note="This region represents a CpG dinucleotide"
  misc_feature (61)..(61): /note="Nucleotide may be methylated to form 5-methylcytosine"
gaccatgagtcacccaagcccagctcggccacatgccttcctgggagaaggaaccggaggcgcccaggagagtcagaagcctcttagagataaacattcggctaaggcttgccctgcccttc

SEQ ID NO: 23785 - DNA, 122 bp, Homo sapiens
  misc_feature (61)..(62): /note="This region represents a CpG dinucleotide"
  misc_feature (61)..(61): /note="Nucleotide may be methylated to form 5-methylcytosine"
tttctgcacagtatcagcagagcctctactctgtcactggcaggatcctagctgtgcaggcgtttgtcagcctaaatctaaatcaagattctgggctgggaattaggatatagctccccatt

SEQ ID NO: 23786 - DNA, 122 bp, Homo sapiens
  misc_feature (61)..(62): /note="This region represents a CpG dinucleotide"
  misc_feature (61)..(61): /note="Nucleotide may be methylated to form 5-methylcytosine"
gaaggcaggggagattatagctggcatgaagtcaagctccatgtggcaggaacaggacaccggtgggggctgccagggatggcagagcaaggtgagtcatagattgccttttcactttaaca

SEQ ID NO: 23787 - DNA, 122 bp, Homo sapiens
  misc_feature (61)..(62): /note="This region represents a CpG dinucleotide"
  misc_feature (61)..(61): /note="Nucleotide may be methylated to form 5-methylcytosine"
accaagctgctaccttggttttgtaaatgcggagggccaggctctacatgggctggggtccgcggggaggcagggcgccttggtcgctgacttcagccgttgagacctggtgggctgcgggc

SEQ ID NO: 23788 - DNA, 122 bp, Homo sapiens
  misc_feature (61)..(62): /note="This region represents a CpG dinucleotide"
  misc_feature (61)..(61): /note="Nucleotide may be methylated to form 5-methylcytosine"
gattactgccctgtgagagagaaccaagggcgcttgtttgccccttccacaatgtgagaacgcagcaggaagatatcctgtgaagcagaaagtaagccctcaccagataccacatccgttgg

SEQ ID NO: 23789 - DNA, 122 bp, Homo sapiens
  misc_feature (61)..(62): /note="This region represents a CpG dinucleotide"
  misc_feature (61)..(61): /note="Nucleotide may be methylated to form 5-methylcytosine"
ttccaaagttgtaccaatttacattcctaccaccagtacatgagggttccagatgctgaacgtcctcactaatgcttggtaatgtctgcctttttcattttagtcattctggaggtagtgtg

SEQ ID NO: 23790 - DNA, 122 bp, Homo sapiens
  misc_feature (61)..(62): /note="This region represents a CpG dinucleotide"
  misc_feature (61)..(61): /note="Nucleotide may be methylated to form 5-methylcytosine"
gggcggtccgcctctcagacgtagaggcccggcctcggatgaaggcggaagggagggcaccgcctgttgctgggcaactgtgccccaactcgtctgcccctggggagtgtttgtttccaaag

SEQ ID NO: 23791 - DNA, 122 bp, Homo sapiens
  misc_feature (61)..(62): /note="This region represents a CpG dinucleotide"
  misc_feature (61)..(61): /note="Nucleotide may be methylated to form 5-methylcytosine"
acactcacctcttccggagagctgttcccaattcaccaaccaaatcccgatgaggccccacgtctttggagttccagttccaagacacaggactcggccagtttgtgaagccttcgtgatgc

SEQ ID NO: 23792 - DNA, 122 bp, Homo sapiens
  misc_feature (61)..(62): /note="This region represents a CpG dinucleotide"
  misc_feature (61)..(61): /note="Nucleotide may be methylated to form 5-methylcytosine"
cccagggaagctaaaagtttggacacccctggttagaccaaggttctcgacacaagcatgcgtcagggttatccagagagttagatgaaacacaggttcctgggctccagggtttctggtcc

SEQ ID NO: 23793 - DNA, 122 bp, Homo sapiens
  misc_feature (61)..(62): /note="This region represents a CpG dinucleotide"
  misc_feature (61)..(61): /note="Nucleotide may be methylated to form 5-methylcytosine"
gaatgtgaaattgctttgtaaacataacgggccacacctgatatatatttacatttttcccgctactcacagccagtcacagtcgtctcactatgttctaatgccatcctagccatggtgca

SEQ ID NO: 23794 - DNA, 122 bp, Homo sapiens
  misc_feature (61)..(62): /note="This region represents a CpG dinucleotide"
  misc_feature (61)..(61): /note="Nucleotide may be methylated to form 5-methylcytosine"
agatgcttattttggaaggttttgtagggttgacgtggaggtagaatgagacaatgctagcgtagaatcctgtgagtgatttttatgtttcgttgttgttgttgttgtttttggctatcatt

SEQ ID NO: 23795 - DNA, 122 bp, Homo sapiens
  misc_feature (61)..(62): /note="This region represents a CpG dinucleotide"
  misc_feature (61)..(61): /note="Nucleotide may be methylated to form 5-methylcytosine"
cagatgtaaagtccctagacaaaacactagcaaattaaatttggcaataaatagcaatatcgtgagcaagtattaataggatttattccagtaaagttcaatatcaaaaaaactattaccat

SEQ ID NO: 23796 - DNA, 122 bp, Homo sapiens
  misc_feature (61)..(62): /note="This region represents a CpG dinucleotide"
  misc_feature (61)..(61): /note="Nucleotide may be methylated to form 5-methylcytosine"
gtcttaatcttataagtaatatttcctgtgtatgcatctgctaagtccctccagaactcacgttgaaacttaatctcaaagaggcaggacactgaggaggagattaggtcatgagtgctcct

SEQ ID NO: 23797 - DNA, 122 bp, Homo sapiens
  misc_feature (61)..(62): /note="This region represents a CpG dinucleotide"
  misc_feature (61)..(61): /note="Nucleotide may be methylated to form 5-methylcytosine"
tgtgcaaagccgagctgtcaacaaagctcagctgtcattatctttcctaggatctttctccgagggcagggcccacagtatgaattctccttccattgcctggactgtagaagactttcggt

SEQ ID NO: 23798 - DNA, 122 bp, Homo sapiens
  misc_feature (61)..(62): /note="This region represents a CpG dinucleotide"
  misc_feature (61)..(61): /note="Nucleotide may be methylated to form 5-methylcytosine"
gtgttttgctttgcaactaagaccgtgacttcctgtttgatggtttgtcacttcacaggccgccacataaaccccataaaagacactctatggtggctgcaaagaaagcactgttaggttct

SEQ ID NO: 23799 - DNA, 122 bp, Homo sapiens
  misc_feature (61)..(62): /note="This region represents a CpG dinucleotide"
  misc_feature (61)..(61): /note="Nucleotide may be methylated to form 5-methylcytosine"
agatagcccacatgtgttggtattgttcatgatcatgttatttctagttttgcaatattacgttatcaagttaggatggaaaagatcttatctgctgataaggttagaagtgagatttagat

SEQ ID NO: 23800 - DNA, 122 bp, Homo sapiens
  misc_feature (61)..(62): /note="This region represents a CpG dinucleotide"
  misc_feature (61)..(61): /note="Nucleotide may be methylated to form 5-methylcytosine"
gagagcagaagttttaaacctcatttgaccttcatgaagttgtcaaaatcaccgtggctccgtaagaatgtgagtgcatgttcttattgcaagcctgttttaccaggccacaccagccataa

SEQ ID NO: 23801 - DNA, 122 bp, Homo sapiens
  misc_feature (61)..(62): /note="This region represents a CpG dinucleotide"
  misc_feature (61)..(61): /note="Nucleotide may be methylated to form 5-methylcytosine"
ctccaaccagttctgcaactgccctgagtctgtgtcttagcaaagaggccattagccacccgactccctggcttatcactgggcccttcctcatcagacacagagatcaaattctgagggtg

SEQ ID NO: 23802 - DNA, 122 bp, Homo sapiens
  misc_feature (61)..(62): /note="This region represents a CpG dinucleotide"
  misc_feature (61)..(61): /note="Nucleotide may be methylated to form 5-methylcytosine"
gagaatatgttagtggctgccaggaaaacttgtcatcattttagtcattcggtcaaggcccgtcagatactgcaagagttccaaaatgatcaccaacttccatggaagaatttgaagcagga

SEQ ID NO: 23803 - DNA, 122 bp, Homo sapiens
  misc_feature (61)..(62): /note="This region represents a CpG dinucleotide"
  misc_feature (61)..(61): /note="Nucleotide may be methylated to form 5-methylcytosine"
ccgcctgcctcggcctgccaaagtgctgggattgcaaagtgtgagccaccacaatcagcgcgatttcagagattattaagggcaggggaaggaatcccttctaagagaagtttggaggaagt

SEQ ID NO: 23804 - DNA, 122 bp, Homo sapiens
  misc_feature (61)..(62): /note="This region represents a CpG dinucleotide"
  misc_feature (61)..(61): /note="Nucleotide may be methylated to form 5-methylcytosine"
tggcaaaacatctcaaatgtagggcttatgacaaaatgaccagagatttgccctgtgactcgctccttattaaaaccaggaaatctccatcctatctggtgagacagctgtgcaggcaactt

SEQ ID NO: 23805 - DNA, 122 bp, Homo sapiens
  misc_feature (61)..(62): /note="This region represents a CpG dinucleotide"
  misc_feature (61)..(61): /note="Nucleotide may be methylated to form 5-methylcytosine"
tttttagatggaagggagtggagagaatattttgtgcatgtgtgcgtgcgtctgaagtcacgccagataggtgactatatgccatttgcttatttgtgctaacttgggttgtgactgctttt

SEQ ID NO: 23806 - DNA, 122 bp, Homo sapiens
  misc_feature (61)..(62): /note="This region represents a CpG dinucleotide"
  misc_feature (61)..(61): /note="Nucleotide may be methylated to form 5-methylcytosine"
ccctctcagagacaaagagtggcagaagcaatctaggagctggagtcatatgaggaaatgcgtatcacttgctcacagactgctgtgagtaaagttcaggatgggtcacctggaagtaggaa

SEQ ID NO: 23807 - DNA, 122 bp, Homo sapiens
  misc_feature (61)..(62): /note="This region represents a CpG dinucleotide"
  misc_feature (61)..(61): /note="Nucleotide may be methylated to form 5-methylcytosine"
tttgtctctttattacacccaaacaccataaacagagccaatgaagagattgctcaggttcgaacaaaagcaaaggctgagagtgcagctctccatgctggactccgcaaagagcagatgaa

SEQ ID NO: 23808 - DNA, 122 bp, Homo sapiens
  misc_feature (61)..(62): /note="This region represents a CpG dinucleotide"
  misc_feature (61)..(61): /note="Nucleotide may be methylated to form 5-methylcytosine"
catttgggatattaccagttcttgccattgtgttctcatgctgctgtagattcctattgccgtcctataccattctggtgattcagctactctctgtagctgctattcctgctactgagcaa

SEQ ID NO: 23809 - DNA, 122 bp, Homo sapiens
  misc_feature (61)..(62): /note="This region represents a CpG dinucleotide"
  misc_feature (61)..(61): /note="Nucleotide may be methylated to form 5-methylcytosine"
ctctacgttcagctccccttttgtggatgatcgtgaagctgtttacatgttgtcctcttccgtgaactgatccctgtaaacagtgacaggattttatccaaatatttctgatttctaaggga

SEQ ID NO: 23810 - DNA, 122 bp, Homo sapiens
  misc_feature (61)..(62): /note="This region represents a CpG dinucleotide"
  misc_feature (61)..(61): /note="Nucleotide may be methylated to form 5-methylcytosine"
atcatgtagggatgttggttgcaattagtgcagtgaagggactttccagagtctggggtacgcatgttttttgagagtagggtagatgtaacttttgtctatactggagattgcttaataga

SEQ ID NO: 23811 - DNA, 122 bp, Homo sapiens
  misc_feature (61)..(62): /note="This region represents a CpG dinucleotide"
  misc_feature (61)..(61): /note="Nucleotide may be methylated to form 5-methylcytosine"
ctgtgccaagaaccctaagctactgtgggttaattggagttgtagcaagtatttctttctcggctgtctcttttagcagagcttctctctctctctctctctctctctctctctctctctct

SEQ ID NO: 23812 - DNA, 122 bp, Homo sapiens
  misc_feature (61)..(62): /note="This region represents a CpG dinucleotide"
  misc_feature (61)..(61): /note="Nucleotide may be methylated to form 5-methylcytosine"
ctctctgtgggccatgtggacgagtttctgacctttgtgcctacctctgaccaaaaggtgcgtcccctccttccctgcctgagccacctctgcccttgtctgacctgatgggatgagtcagg

SEQ ID NO: 23813 - DNA, 122 bp, Homo sapiens
  misc_feature (61)..(62): /note="This region represents a CpG dinucleotide"
  misc_feature (61)..(61): /note="Nucleotide may be methylated to form 5-methylcytosine"
tccaagactgtgagaggaggaacctctgttgtttggagccacgtgcagtgattttacagccgcctgggaaacgcatacagtggtcctgtgctcttagcctttcattgaaagagtccacatgc

SEQ ID NO: 23814 - DNA, 122 bp, Homo sapiens
  misc_feature (61)..(62): /note="This region represents a CpG dinucleotide"
  misc_feature (61)..(61): /note="Nucleotide may be methylated to form 5-methylcytosine"
gatacagtttggtttgcttggatttcactttgggattggaggccaatggcccaactgctacggcatacatttgtgaaatctcatacttggccagttagccatgttagatagggaggttacag

SEQ ID NO: 23815 - DNA, 122 bp, Homo sapiens
  misc_feature (61)..(62): /note="This region represents a CpG dinucleotide"
  misc_feature (61)..(61): /note="Nucleotide may be methylated to form 5-methylcytosine"
ccagttccggcctagcacataggacaccaaagacaaactatacctgaggcagcctgagggcgccccagagaaccagacggacaggataaggctcttgactgtcgcccacttgtcaaggccac

SEQ ID NO: 23816 - DNA, 122 bp, Homo sapiens
  misc_feature (61)..(62): /note="This region represents a CpG dinucleotide"
  misc_feature (61)..(61): /note="Nucleotide may be methylated to form 5-methylcytosine"
taaactgatttgtgatagcagagcagagatttgtgataggagaggttaatgccgctagcacgtcagtgcagaagggattcagatcctggctcaggccctgcctacctgtgtgaccttcagaa

SEQ ID NO: 23817 - DNA, 122 bp, Homo sapiens
  misc_feature (61)..(62): /note="This region represents a CpG dinucleotide"
  misc_feature (61)..(61): /note="Nucleotide may be methylated to form 5-methylcytosine"
tttgtcaaagcagaggcctgagcaaagtaagagctcaagcaaccgaaaccagctgcctggcgagggctcagcataaactgagcagaataaccacaaggggaagggtgtctagacagcctcgg

SEQ ID NO: 23818 - DNA, 122 bp, Homo sapiens
  misc_feature (61)..(62): /note="This region represents a CpG dinucleotide"
  misc_feature (61)..(61): /note="Nucleotide may be methylated to form 5-methylcytosine"
caagcacagacaggtttagttacctgtccaggagcacacagtgagcattggcagagccaacgtatttttccccagtctgactccagagctgggcctctacccagggtgccacacgcggtgca

SEQ ID NO: 23819 - DNA, 122 bp, Homo sapiens
  misc_feature (61)..(62): /note="This region represents a CpG dinucleotide"
  misc_feature (61)..(61): /note="Nucleotide may be methylated to form 5-methylcytosine"
gcctgctccatccttcccttcccttctacccacaactgacttgctttataatggaagaagcgttttaatgcctgccatgaaatcctgtcatctggacaggaagggcaagctccctggctgaa

SEQ ID NO: 23820 - DNA, 122 bp, Homo sapiens
  misc_feature (61)..(62): /note="This region represents a CpG dinucleotide"
  misc_feature (61)..(61): /note="Nucleotide may be methylated to form 5-methylcytosine"
gtgctgggattacaggcgtgagccaccacgcctggctgcaaccagcttttcttaagagcacggtttcttaatccaggcctgtgatcctctgatgcacagagatttgttggcatgtctgtcat

SEQ ID NO: 23821 - DNA, 122 bp, Homo sapiens
  misc_feature (61)..(62): /note="This region represents a CpG dinucleotide"
  misc_feature (61)..(61): /note="Nucleotide may be methylated to form 5-methylcytosine"
cagcagatcataagcccagtcttctgagatcttgtgacaggtcccattagctatgagctacgcaataatgtgtgtaatcagttgttaatggcaatatgctattctgtgataactgggccatt

SEQ ID NO: 23822 - DNA, 122 bp, Homo sapiens
  misc_feature (61)..(62): /note="This region represents a CpG dinucleotide"
  misc_feature (61)..(61): /note="Nucleotide may be methylated to form 5-methylcytosine"
tcaaaccttaaatcaagtagaattgaaaagttgacagaagcagagaaatccacacacacacggctgaattcaattatgttttgcaagaaaagtgactgaggtatgtcacaaaaagtaggcaa

SEQ ID NO: 23823 - DNA, 122 bp, Homo sapiens
  misc_feature (61)..(62): /note="This region represents a CpG dinucleotide"
  misc_feature (61)..(61): /note="Nucleotide may be methylated to form 5-methylcytosine"
tcactccttggcctccgagatgagcatctccagctcagaagtgaggcctgttgacggaagcgtgatgagctttcctagcccaggcctgctagtctagctggaaggcatcctctctgtcatca

SEQ ID NO: 23824 - DNA, 122 bp, Homo sapiens
  misc_feature (61)..(62): /note="This region represents a CpG dinucleotide"
  misc_feature (61)..(61): /note="Nucleotide may be methylated to form 5-methylcytosine"
agttgggctctgcctgaccagtgaaggaagacgagggagactccaccctctgaccttatccgctgccttcaacctctgagaacggttattcccagtcctattgtttggtacttcctgatcct

SEQ ID NO: 23825 - DNA, 122 bp, Homo sapiens
  misc_feature (61)..(62): /note="This region represents a CpG dinucleotide"
  misc_feature (61)..(61): /note="Nucleotide may be methylated to form 5-methylcytosine"
aatgacatataatcctatacaccaacaggataatatcacgagtgtgtgtggcaacactgccgcatgttaatcctgcctgcctcctgggatgatctttctcatcccagcagagcctacagagc

SEQ ID NO: 23826 - DNA, 122 bp, Homo sapiens
  misc_feature (61)..(62): /note="This region represents a CpG dinucleotide"
  misc_feature (61)..(61): /note="Nucleotide may be methylated to form 5-methylcytosine"
acacaaaagatgtgctgctcagacctcccttaaagaaagactcactgcccagctgtaaggcgtgtggttagatgaacagcctacggctgttgggtttatcaggtttgtctaactgttgagcc

SEQ ID NO: 23827 - DNA, 122 bp, Homo sapiens
  misc_feature (61)..(62): /note="This region represents a CpG dinucleotide"
  misc_feature (61)..(61): /note="Nucleotide may be methylated to form 5-methylcytosine"
agaacttccggggctcataaaggatctccactgtccatcactcacttccttccttcggtgcgatgactgactggcttcttgactctcaggaaatcagtgtctggggagaagagacaaggagg

SEQ ID NO: 23828 - DNA, 122 bp, Homo sapiens
  misc_feature (61)..(62): /note="This region represents a CpG dinucleotide"
  misc_feature (61)..(61): /note="Nucleotide may be methylated to form 5-methylcytosine"
ggaagacgacaccctgtgcctctggctgggtggcaactttgtgccttcatagtctaaaaacgcaccctcagcgttgcagccccaataggactcagttgatgaacaactttccaggaacgtgg

SEQ ID NO: 23829 - DNA, 122 bp, Homo sapiens
  misc_feature (61)..(62): /note="This region represents a CpG dinucleotide"
  misc_feature (61)..(61): /note="Nucleotide may be methylated to form 5-methylcytosine"
tggcaactcagaactgagtgagcaactgtatgatgtgggctatcgggatatagtgaacatcgacatcagtgaggttgtcatcaagcaaatgaaggaatgtaatgccacccgacggccccaga

SEQ ID NO: 23830 - DNA, 122 bp, Homo sapiens
  misc_feature (61)..(62): /note="This region represents a CpG dinucleotide"
  misc_feature (61)..(61): /note="Nucleotide may be methylated to form 5-methylcytosine"
tttgagcctggaagagaaatgacagtgattccctcagagaaatgacaaagctcatctgtgcggagcctgtgagatgaagcttgtgattaaggcctattgccaattgcatcagagcctgattc

SEQ ID NO: 23831 - DNA, 122 bp, Homo sapiens
  misc_feature (61)..(62): /note="This region represents a CpG dinucleotide"
  misc_feature (61)..(61): /note="Nucleotide may be methylated to form 5-methylcytosine"
ggtggggaggttatcataatgaagtatatactggctaatttccctccacttctccttgaccgccccgcttctttcaccaaggcagtctaagaggaagtagctatctacttcaacaacagctc

SEQ ID NO: 23832 - DNA, 122 bp, Homo sapiens
  misc_feature (61)..(62): /note="This region represents a CpG dinucleotide"
  misc_feature (61)..(61): /note="Nucleotide may be methylated to form 5-methylcytosine"
aaacacaagcaaagaaatataggtctgtagaataaggattaatccacattgcaggattatcgttagtggtgaaaaacaaacacatgcaagcaagcctggaaacaactgggatatccaccact

SEQ ID NO: 23833 - DNA, 122 bp, Homo sapiens
  misc_feature (61)..(62): /note="This region represents a CpG dinucleotide"
  misc_feature (61)..(61): /note="Nucleotide may be methylated to form 5-methylcytosine"
attctgaagtagagggtgttaaataaattggcccatttaacattacaatagcagctgatgcggacctctggctgtgggtcaggcaatgtgccaaatagttgtgtgcataatcatatttagtt

SEQ ID NO: 23834 - DNA, 122 bp, Homo sapiens
  misc_feature (61)..(62): /note="This region represents a CpG dinucleotide"
  misc_feature (61)..(61): /note="Nucleotide may be methylated to form 5-methylcytosine"
cgggtgcccttgtcttttctttgtcttgtgactgacctggatttctggaggaactgtcctcgtcttagaatgatctgttgcttttcttctgagattagaggtattagattctctcccaagag

SEQ ID NO: 23835 - DNA, 122 bp, Homo sapiens
  misc_feature (61)..(62): /note="This region represents a CpG dinucleotide"
  misc_feature (61)..(61): /note="Nucleotide may be methylated to form 5-methylcytosine"
agaagacagattagtatttttcatgctgacaaaaaatagctgctatgacttttcccgcaacgtggacaggggccaagtgaagctgaactggtcatggtctgtcgcccagtgttcccttgtcg

SEQ ID NO: 23836 - DNA, 122 bp, Homo sapiens
  misc_feature (61)..(62): /note="This region represents a CpG dinucleotide"
  misc_feature (61)..(61): /note="Nucleotide may be methylated to form 5-methylcytosine"
gagggtacactgtgtaagggtgtctcctttgtggactgattcgagtggctccctcccaaacgaaggctcacccttgtctgctttttggtatggctaatggttatgttgaatgtaatgtgttc

SEQ ID NO: 23837 - DNA, 122 bp, Homo sapiens
  misc_feature (61)..(62): /note="This region represents a CpG dinucleotide"
  misc_feature (61)..(61): /note="Nucleotide may be methylated to form 5-methylcytosine"
ctcctgggtgaggcaaacattttgagtcagttgagagggatcgctcattcactcttgcagcgggaaggcagagaagtttcagtttatcttctgttctgtctcaatcagttgggtagaatgag

SEQ ID NO: 23838 - DNA, 122 bp, Homo sapiens
  misc_feature (61)..(62): /note="This region represents a CpG dinucleotide"
  misc_feature (61)..(61): /note="Nucleotide may be methylated to form 5-methylcytosine"
ggtgaggctccgacaacgcccaggagcacctgtgatgccgtcattaggaacctacctcgtcgccccgattccatcccctcccgacacctgactgcgcgtgttctcctttgcagttctttcct

SEQ ID NO: 23839 - DNA, 122 bp, Homo sapiens
  misc_feature (61)..(62): /note="This region represents a CpG dinucleotide"
  misc_feature (61)..(61): /note="Nucleotide may be methylated to form 5-methylcytosine"
cagctctgacattctgtggtcctgcagaactgggatctgagccaggtctcaagagcagagcgcatagataggccatgagaatagagaacagcattccaagtaatattaatgtatcagccagc

SEQ ID NO: 23840 - DNA, 122 bp, Homo sapiens
  misc_feature (61)..(62): /note="This region represents a CpG dinucleotide"
  misc_feature (61)..(61): /note="Nucleotide may be methylated to form 5-methylcytosine"
ctgctggtataatcctttagaggctcaagagtttctttttaggaagggtttgggatggagcgcaacctagatagaaggaaatagaggacctgaattgaaagtgtgtttgtagagcaaacata

SEQ ID NO: 23841 - DNA, 122 bp, Homo sapiens
  misc_feature (61)..(62): /note="This region represents a CpG dinucleotide"
  misc_feature (61)..(61): /note="Nucleotide may be methylated to form 5-methylcytosine"
ccaggtttggggattcctgggactgaaagacagaacaaccaaatccaagtcagtatgtcacgctgcagtgtaaagtaggtgacatcacccagcagtgctctgcccaggcccagccagggcgt

SEQ ID NO: 23842 - DNA, 122 bp, Homo sapiens
  misc_feature (61)..(62): /note="This region represents a CpG dinucleotide"
  misc_feature (61)..(61): /note="Nucleotide may be methylated to form 5-methylcytosine"
cccgaactgcccagttaattgtgaagctataagacagtcctggccagggctcatctccaccgctagctggggatcccaccacatagctagacaggttcctgaatggacttctccttcaggac

SEQ ID NO: 23843 - DNA, 122 bp, Homo sapiens
  misc_feature (61)..(62): /note="This region represents a CpG dinucleotide"
  misc_feature (61)..(61): /note="Nucleotide may be methylated to form 5-methylcytosine"
gccgccacacgcgtggatacttccagttcatgcttttcatttctctgttctgtctcactgcggcactccctgactccttggggataaggaagacaaaggcagttctcggaatgtgggccaga

SEQ ID NO: 23844 - DNA, 122 bp, Homo sapiens
  misc_feature (61)..(62): /note="This region represents a CpG dinucleotide"
  misc_feature (61)..(61): /note="Nucleotide may be methylated to form 5-methylcytosine"
ttctgtttatctgtgtcctgtatcactgcactcctgtgtgtacacctctgtttgcacatgcgtggcatggccatatctccacgtgtgtccagtacagatcatctgtgtacaggttgtgggta

SEQ ID NO: 23845 - DNA, 122 bp, Homo sapiens
  misc_feature (61)..(62): /note="This region represents a CpG dinucleotide"
  misc_feature (61)..(61): /note="Nucleotide may be methylated to form 5-methylcytosine"
tgtaccctagaacttaaagtataataaaaaaaaaaaaaagaggaagctgttaaccacttacggttgcatcacttggccaccagcacctcaggcttatccatgaagtaactacagctgagaat

SEQ ID NO: 23846 - DNA, 122 bp, Homo sapiens
  misc_feature (61)..(62): /note="This region represents a CpG dinucleotide"
  misc_feature (61)..(61): /note="Nucleotide may be methylated to form 5-methylcytosine"
aattaattggagagcttaacctaagcaacctctaaagcagggcgtgaccctgaggaaaagcgaatggaaattctgtgaggggaccagttccaagaaccaaccacagcccttccatgaaaagg

SEQ ID NO: 23847 - DNA, 122 bp, Homo sapiens
  misc_feature (61)..(62): /note="This region represents a CpG dinucleotide"
  misc_feature (61)..(61): /note="Nucleotide may be methylated to form 5-methylcytosine"
ctaacaatatatgtgagaactgagttatgacaagtgagtagacattttccagatgggttacgagacaaagggcattttaagcagagacaacagcataagcacaaggccttgcattatggcag

SEQ ID NO: 23848 - DNA, 122 bp, Homo sapiens
  misc_feature (61)..(62): /note="This region represents a CpG dinucleotide"
  misc_feature (61)..(61): /note="Nucleotide may be methylated to form 5-methylcytosine"
agatgcatgcttactgaacatttctacatggagtatttgcttgcagctttcactatcgaacgtgatcctgtttatgcatttatttgtagtttattttctgtctccttgaacccttgctttta

SEQ ID NO: 23849 - DNA, 122 bp, Homo sapiens
  misc_feature (61)..(62): /note="This region represents a CpG dinucleotide"
  misc_feature (61)..(61): /note="Nucleotide may be methylated to form 5-methylcytosine"
tcagaaaaaggaggggcgacaaaggaaaataattaggctgtagcctcaattgtgcattcccgtgcaaggtgccctgactcgccacagcggtaacagttgacttcacttgtcttgctgcagtt

SEQ ID NO: 23850 - DNA, 122 bp, Homo sapiens
  misc_feature (61)..(62): /note="This region represents a CpG dinucleotide"
  misc_feature (61)..(61): /note="Nucleotide may be methylated to form 5-methylcytosine"
atatggtacttaatccctagaagcaggtatacactgggcgggatagcccagtggttaagacggtccctgctgtgcagcttactgttgtgtgtaacctcagacaagttacctcatccctctgg

SEQ ID NO: 23851 - DNA, 122 bp, Homo sapiens
  misc_feature (61)..(62): /note="This region represents a CpG dinucleotide"
  misc_feature (61)..(61): /note="Nucleotide may be methylated to form 5-methylcytosine"
tctgtcagctacagcatgaaaaattcagtgtcctgcagattccccatcgcagtgaatcatcgcatcagccagagagcaagctgactaatgattgctatgctgcagacaatgaagatgatata

SEQ ID NO: 23852 - DNA, 122 bp, Homo sapiens
  misc_feature (61)..(62): /note="This region represents a CpG dinucleotide"
  misc_feature (61)..(61): /note="Nucleotide may be methylated to form 5-methylcytosine"
taaaaaaattttcaaagtgtacaacatttgtactgtcttccgttaaattgcttttgcccacgtggtttgctcccaaggttttgaggtggtagggactctgagtgagggcagaaggcacacag

SEQ ID NO: 23853 - DNA, 122 bp, Homo sapiens
  misc_feature (61)..(62): /note="This region represents a CpG dinucleotide"
  misc_feature (61)..(61): /note="Nucleotide may be methylated to form 5-methylcytosine"
ccaccttgacctcccaaagtgttataattgcaggcgtgagccactgtgcccagcctcgggcgagctgccgcttaaccactcaagtcatatccctgcatcttcgaatgggaacagtgactcac

SEQ ID NO: 23854 - DNA, 122 bp, Homo sapiens
  misc_feature (61)..(62): /note="This region represents a CpG dinucleotide"
  misc_feature (61)..(61): /note="Nucleotide may be methylated to form 5-methylcytosine"
ttctgtttggaatttgctttcctacttcggtggttatctgcttgcccttggtatccagtgcgtttggattgaattttgtagctctgggagtacagcagtggcaatatgggccccaggtgatg

SEQ ID NO: 23855 - DNA, 122 bp, Homo sapiens
  misc_feature (61)..(62): /note="This region represents a CpG dinucleotide"
  misc_feature (61)..(61): /note="Nucleotide may be methylated to form 5-methylcytosine"
ctggcaacagaaaattctatttttcactccttttgtggaggaagagtgcagagcaaacaacgtactacttttatgtccaaaatgaagtcagattcctggtaaaagatgggtgtgtttttggg

SEQ ID NO: 23856 - DNA, 122 bp, Homo sapiens
  misc_feature (61)..(62): /note="This region represents a CpG dinucleotide"
  misc_feature (61)..(61): /note="Nucleotide may be methylated to form 5-methylcytosine"
gggagtccagcctgcaagagcggcaccgagtcctctaatacttactcgcagccaggagcccgtaaggacacagagaagcaagcctctagctgctggaacagatgtccccagctccaagaagc

SEQ ID NO: 23857 - DNA, 122 bp, Homo sapiens
  misc_feature (61)..(62): /note="This region represents a CpG dinucleotide"
  misc_feature (61)..(61): /note="Nucleotide may be methylated to form 5-methylcytosine"
gggctcaagcaatcctttgccttgacctcccaaagtgctgggataataggtgtgaaccaccgagcccaactaataaggattattttaattggcatctttggtctttgacctctgagcttcta

SEQ ID NO: 23858 - DNA, 122 bp, Homo sapiens
  misc_feature (61)..(62): /note="This region represents a CpG dinucleotide"
  misc_feature (61)..(61): /note="Nucleotide may be methylated to form 5-methylcytosine"
aatggcacttttatgagaactctagaaatagaacttttcatccggcaccatcttatggtacgctttggagcagtgatgtcaccaaggagacagaaactagggaattcatcctcttgggccgg

SEQ ID NO: 23859 - DNA, 122 bp, Homo sapiens
  misc_feature (61)..(62): /note="This region represents a CpG dinucleotide"
  misc_feature (61)..(61): /note="Nucleotide may be methylated to form 5-methylcytosine"
cagcgagcggacttgcttctagaggcagctgtaagcatttccctactgagcaaccacacacgtcggatgtgagtggcatatgtatgtgtgtgtttttccttccggttgctgtgaggtgatgt

SEQ ID NO: 23860 - DNA, 122 bp, Homo sapiens
  misc_feature (61)..(62): /note="This region represents a CpG dinucleotide"
  misc_feature (61)..(61): /note="Nucleotide may be methylated to form 5-methylcytosine"
cgacccataataaccagaatgttattccacggttgcggtttgtttatttcatcagagttgcgtcttcacctatttccctccctactcttaattgtttatccaagttagtgttttccattctt

SEQ ID NO: 23861 - DNA, 122 bp, Homo sapiens
  misc_feature (61)..(62): /note="This region represents a CpG dinucleotide"
  misc_feature (61)..(61): /note="Nucleotide may be methylated to form 5-methylcytosine"
ctcagccaggaagtgctctgtttttgccctccccttcctctttctactgctgggaatgcacgcagagtggctaggggtccagtgccatcttgaaccattcaaatggaaaccacacttccatt

SEQ ID NO: 23862 - DNA, 122 bp, Homo sapiens
  misc_feature (61)..(62): /note="This region represents a CpG dinucleotide"
  misc_feature (61)..(61): /note="Nucleotide may be methylated to form 5-methylcytosine"
ttgaggactctgtcgaccataggcaccctgatggacctaaataaattactcaacttttcacgagaatattttacctaataactggaacttatcatccagaacaatgttttctgcctctttgt

SEQ ID NO: 23863 - DNA, 122 bp, Homo sapiens
  misc_feature (61)..(62): /note="This region represents a CpG dinucleotide"
  misc_feature (61)..(61): /note="Nucleotide may be methylated to form 5-methylcytosine"
ttaaggaggtcgtatataaggaaacctctgcctatggcctctccccactaaatgtgtcaccgtagcttcaccttaaaggaacttgagacctcaagaagaacacagtgtcctttagtcccttt

SEQ ID NO: 23864 - DNA, 122 bp, Homo sapiens
  misc_feature (61)..(62): /note="This region represents a CpG dinucleotide"
  misc_feature (61)..(61): /note="Nucleotide may be methylated to form 5-methylcytosine"
tgcgggataatctcagagtacttaaccttaatctcatttgcacagtcccctttgctatgtcgtaacatattcaaagattctggggattaggtcatggatatatttggaggggttattattct

SEQ ID NO: 23865 - DNA, 122 bp, Homo sapiens
  misc_feature (61)..(62): /note="This region represents a CpG dinucleotide"
  misc_feature (61)..(61): /note="Nucleotide may be methylated to form 5-methylcytosine"
tccagagactatgaccagtaatcaaatcatgttgtggttagatccattagccaggaaaggcgtggagcatgaaagacagatctgattgtcacccataggtccctgaactgtatcctggatct

SEQ ID NO: 23866 - DNA, 122 bp, Homo sapiens
  misc_feature (61)..(62): /note="This region represents a CpG dinucleotide"
  misc_feature (61)..(61): /note="Nucleotide may be methylated to form 5-methylcytosine"
cccttcttctacaaggacgtcttcagagatctggaggaggaaagggccttgccctgagttcgctgagccagaacaataggacttcttctgtagttgtgaaacttgtcagttgttgaagtcag

SEQ ID NO: 23867 - DNA, 122 bp, Homo sapiens
  misc_feature (61)..(62): /note="This region represents a CpG dinucleotide"
  misc_feature (61)..(61): /note="Nucleotide may be methylated to form 5-methylcytosine"
gaatcagacacggcagtccagggtgtgcactgcacaagggtagttggcccaggaagcgagcgagagctggaacacagcttacacttggctaactgagccacatgctgggcacagggcttcct

SEQ ID NO: 23868 - DNA, 122 bp, Homo sapiens
  misc_feature (61)..(62): /note="This region represents a CpG dinucleotide"
  misc_feature (61)..(61): /note="Nucleotide may be methylated to form 5-methylcytosine"
agggcaggaggggggagttatttacattagcatttgccaagttttcactgtttatcttaccggaaagtcaacagtgtgactattaacctcctgcataattaaaatttgggccttgttatggt

SEQ ID NO: 23869 - DNA, 122 bp, Homo sapiens
  misc_feature (61)..(62): /note="This region represents a CpG dinucleotide"
  misc_feature (61)..(61): /note="Nucleotide may be methylated to form 5-methylcytosine"
ctaaagtgactgtattttcatttcagttgttctggtgtgcttcctgaggcttaggatacccgtgtgggttggagtcaccagtacatgtctgtgtgctcagccacagttcattggtcccagtg

SEQ ID NO: 23870 - DNA, 122 bp, Homo sapiens
  misc_feature (61)..(62): /note="This region represents a CpG dinucleotide"
  misc_feature (61)..(61): /note="Nucleotide may be methylated to form 5-methylcytosine"
gcgacatttcataaagaggcaatttatcaagatgacatagcagtcctaattatttgtgcccgtaattacaaagcttcaaaatacttgaaacaaaattgatagaattgcaaggagaaattttt

SEQ ID NO: 23871 - DNA, 122 bp, Homo sapiens
  misc_feature (61)..(62): /note="This region represents a CpG dinucleotide"
  misc_feature (61)..(61): /note="Nucleotide may be methylated to form 5-methylcytosine"
gcagtggttacataactgcatacatttgtcaaaactcacagaaccggcaggtaggctgggcgcggtagctcatgcctgtaatcccagcactgtgggaggctgaggcgggtggatcacttgag

SEQ ID NO: 23872 - DNA, 122 bp, Homo sapiens
  misc_feature (61)..(62): /note="This region represents a CpG dinucleotide"
  misc_feature (61)..(61): /note="Nucleotide may be methylated to form 5-methylcytosine"
gatgcaagcaggaatgcaaggtagtttctgcctgcagagcaaactttcgccaattagggccgtgtgcagtggctcatgcctgttattccagcactttgggaggccaaggtgggcggatcacc

SEQ ID NO: 23873 - DNA, 122 bp, Homo sapiens
  misc_feature (61)..(62): /note="This region represents a CpG dinucleotide"
  misc_feature (61)..(61): /note="Nucleotide may be methylated to form 5-methylcytosine"
actgtggttctgagaagtgagagtcagctacctcctccaagggggcctccacagtgagagcgcacacagttgtccgtctgcaagaactgttggtacttaccatagcaaacatgtacggacag

SEQ ID NO: 23874 - DNA, 122 bp, Homo sapiens
  misc_feature (61)..(62): /note="This region represents a CpG dinucleotide"
  misc_feature (61)..(61): /note="Nucleotide may be methylated to form 5-methylcytosine"
caaagtgatagtaaatgcattaagtgcttcatgagaaactctagagtcacagagacaggccgtcctccatctggatgtcactaggacataatgcatgctctctggctcacactgaggacaac

SEQ ID NO: 23875 - DNA, 122 bp, Homo sapiens
  misc_feature (61)..(62): /note="This region represents a CpG dinucleotide"
  misc_feature (61)..(61): /note="Nucleotide may be methylated to form 5-methylcytosine"
ggtgatccaccagcctcagccccccaaaatgctgggattataggcatgagccaccgcacccggacaaaagtaagactttttaataatggttttgcaagatcggatgtgtgatgggcaggcac

SEQ ID NO: 23876 - DNA, 122 bp, Homo sapiens
  misc_feature (61)..(62): /note="This region represents a CpG dinucleotide"
  misc_feature (61)..(61): /note="Nucleotide may be methylated to form 5-methylcytosine"
acacacacgcttgtgagcacccctaacccaccacttgtctctgatgaatcatgtttccagcggataatacctaaaacttccgtggtgggaggaacactgacttggaaccagaagccacaagg

SEQ ID NO: 23877 - DNA, 122 bp, Homo sapiens
  misc_feature (61)..(62): /note="This region represents a CpG dinucleotide"
  misc_feature (61)..(61): /note="Nucleotide may be methylated to form 5-methylcytosine"
tgaatcacagatggactgagtctaattacaaatcagctttgactcagctcagtctctgaccggttgatatagtcagctcttcatgcattcttcctgacagaggaaacattgaattctgtctg

SEQ ID NO: 23878 - DNA, 122 bp, Homo sapiens
  misc_feature (61)..(62): /note="This region represents a CpG dinucleotide"
  misc_feature (61)..(61): /note="Nucleotide may be methylated to form 5-methylcytosine"
gtcagagattaagttctattgctaattttatgcaaggctttataaaatcacttaccttcccgtatagttcaatttttccatctttaaaatgaatacaatatatgtctagctcagagcgatgt

SEQ ID NO: 23879 - DNA, 122 bp, Homo sapiens
  misc_feature (61)..(62): /note="This region represents a CpG dinucleotide"
  misc_feature (61)..(61): /note="Nucleotide may be methylated to form 5-methylcytosine"
agtaagagccttccataccgaaagaattctgagtggttcttgacctgggctgcagtctagcgtcaccacgtaaaagggagtatatggagcacctggacatatcatgcatgactggtgggagt

SEQ ID NO: 23880 - DNA, 122 bp, Homo sapiens
  misc_feature (61)..(62): /note="This region represents a CpG dinucleotide"
  misc_feature (61)..(61): /note="Nucleotide may be methylated to form 5-methylcytosine"
cagagagcagaccccctgcctggcatgggcctgctcaggccttgctccaacaccgaggcccgggccaagggcacctgcttggggataacctgactctaactcactgcactggtgacattttc

SEQ ID NO: 23881 - DNA, 122 bp, Homo sapiens
  misc_feature (61)..(62): /note="This region represents a CpG dinucleotide"
  misc_feature (61)..(61): /note="Nucleotide may be methylated to form 5-methylcytosine"
catctgcaaatagtgatacttctccctcctttccaatttgtgtatctccataatacatctcgtgactctagctgagttggctaatgccccagaacaatgtagataacattggcaatcaaggt

SEQ ID NO: 23882 - DNA, 122 bp, Homo sapiens
  misc_feature (61)..(62): /note="This region represents a CpG dinucleotide"
  misc_feature (61)..(61): /note="Nucleotide may be methylated to form 5-methylcytosine"
ttctccaccctgcaattgtcttacatacggaatagttcctggagaaagatctaacatctgcgcaggtctatcctgttctgtggctgtgtttactaaagtgagttctgcgcttacattcacac

SEQ ID NO: 23883 - DNA, 122 bp, Homo sapiens
  misc_feature (61)..(62): /note="This region represents a CpG dinucleotide"
  misc_feature (61)..(61): /note="Nucleotide may be methylated to form 5-methylcytosine"
tgatgttttctggtcggcaatactgtgagtattgtcacacctcataccggtaggaggtagcgctgtccatgactccacagggagaggaaaaccagaaactccacctcgggaccctcccagac

SEQ ID NO: 23884 - DNA, 122 bp, Homo sapiens
  misc_feature (61)..(62): /note="This region represents a CpG dinucleotide"
  misc_feature (61)..(61): /note="Nucleotide may be methylated to form 5-methylcytosine"
ttccttaaggctgagccctagtgtgactttcagtcagaaatgggttatactgtggccaggcgtggtggctcacgcctgtaatcccagcactgtgggaggctgaggtgggctgatcacttgag

SEQ ID NO: 23885 - DNA, 122 bp, Homo sapiens
  misc_feature (61)..(62): /note="This region represents a CpG dinucleotide"
  misc_feature (61)..(61): /note="Nucleotide may be methylated to form 5-methylcytosine"
agaggagaatgatgctgagattaaagcctctcccctggagtgattctatgtggcctgttgcgttggtgcagagaggcaaggcaataaggccttctggggttcagcagagagacaggtcaaac

SEQ ID NO: 23886 - DNA, 122 bp, Homo sapiens
  misc_feature (61)..(62): /note="This region represents a CpG dinucleotide"
  misc_feature (61)..(61): /note="Nucleotide may be methylated to form 5-methylcytosine"
tattatttgtttgccacacttgtcacttattatcaggaaagtaaatttttttcctgaggccgtactcacaacatgtgtgcttacattgcatttgcaagacttggccacatggctacaccaag

SEQ ID NO: 23887 - DNA, 122 bp, Homo sapiens
  misc_feature (61)..(62): /note="This region represents a CpG dinucleotide"
  misc_feature (61)..(61): /note="Nucleotide may be methylated to form 5-methylcytosine"
caggcaggtgacagctcagctcacttcagcccagcaagggcagccggccaggggtgcagacggcgttagcttcttccagggccggcgaaccccaagtcaaggtcgtcccagctcttggccag

SEQ ID NO: 23888 - DNA, 122 bp, Homo sapiens
  misc_feature (61)..(62): /note="This region represents a CpG dinucleotide"
  misc_feature (61)..(61): /note="Nucleotide may be methylated to form 5-methylcytosine"
tccgaacgctgctccatgcacaggaaaagggcattttgtacaatggggacttcccgggaacgcttgctcttaagtaccagaagccggcggagctctggctttcgtgtttttggttttctcct

SEQ ID NO: 23889 - DNA, 122 bp, Homo sapiens
  misc_feature (61)..(62): /note="This region represents a CpG dinucleotide"
  misc_feature (61)..(61): /note="Nucleotide may be methylated to form 5-methylcytosine"
tgtaattctttccccttaattgcaataatcaataggatatggcagtggtaataggatgtacgtgactatgttacataagattgtgacacttctcttgcaaggagcctgtccctcttgatgac

SEQ ID NO: 23890 - DNA, 122 bp, Homo sapiens
  misc_feature (61)..(62): /note="This region represents a CpG dinucleotide"
  misc_feature (61)..(61): /note="Nucleotide may be methylated to form 5-methylcytosine"
tgaaagcagacttctctattgagggctgtcccataatgactcataagaacttagtcctgccgagcgcagtggctcatgcctataaccccagcactttgggaggccgaggcaggcggatcacc

SEQ ID NO: 23891 - DNA, 122 bp, Homo sapiens
  misc_feature (61)..(62): /note="This region represents a CpG dinucleotide"
  misc_feature (61)..(61): /note="Nucleotide may be methylated to form 5-methylcytosine"
cggactctgaaaactctggtatgattttgtgactcagaaaaccaactcacaggccgggtgcggtggctcacgcctgtaatcccagcactttgggaggccgaggcggcggattacgaggttag

SEQ ID NO: 23892 - DNA, 122 bp, Homo sapiens
  misc_feature (61)..(62): /note="This region represents a CpG dinucleotide"
  misc_feature (61)..(61): /note="Nucleotide may be methylated to form 5-methylcytosine"
aagaaaacatattaggtcataggcttccatttcttgcttccatgttactgaatttcacaccgagctgcagttaggcaatcaatggtataaactgtggctaaggaacccaaaggagaagcctt

SEQ ID NO: 23893 - DNA, 122 bp, Homo sapiens
  misc_feature (61)..(62): /note="This region represents a CpG dinucleotide"
  misc_feature (61)..(61): /note="Nucleotide may be methylated to form 5-methylcytosine"
tgatcacattgggaaatggagccactgctttcttgggctgagcttcttgtctgctggctccgggaacacctagtcacctcctcctcacccaggcactgcaaacaggtcattttgatgatcta

SEQ ID NO: 23894 - DNA, 122 bp, Homo sapiens
  misc_feature (61)..(62): /note="This region represents a CpG dinucleotide"
  misc_feature (61)..(61): /note="Nucleotide may be methylated to form 5-methylcytosine"
atctgcctgatgctgaggtctgttcaactccaaagcctggtccaaatggatgacaggggccgtgtcttggaactttgggtaaccagatttggccacatatcacctctcctcttcccagaagc

SEQ ID NO: 23895 - DNA, 122 bp, Homo sapiens
  misc_feature (61)..(62): /note="This region represents a CpG dinucleotide"
  misc_feature (61)..(61): /note="Nucleotide may be methylated to form 5-methylcytosine"
ccattttcaccactagtcttgactccagtttttctggtcctcaggctcctacactattcacgaggatagtaattctgccctaggcagtagaggaatctctaggacttaaaacactatgtgct

SEQ ID NO: 23896 - DNA, 122 bp, Homo sapiens
  misc_feature (61)..(62): /note="This region represents a CpG dinucleotide"
  misc_feature (61)..(61): /note="Nucleotide may be methylated to form 5-methylcytosine"
cttcaagttttaaccaatgagtgttttagaggttaaagtttaaactctgacttggaagcacgctgggtaggactcctctgctcactcagactcaagttggatcatcagaatctctcttgtgt

SEQ ID NO: 23897 - DNA, 122 bp, Homo sapiens
  misc_feature (61)..(62): /note="This region represents a CpG dinucleotide"
  misc_feature (61)..(61): /note="Nucleotide may be methylated to form 5-methylcytosine"
ctactgattatgaacaaagcacaggaatgcaggagtgcagaaagtattttaaaatgctttcgaggaaacttgctcaacttcctgatagatgtacactgaaaactggacattataacattaag

SEQ ID NO: 23898 - DNA, 122 bp, Homo sapiens
  misc_feature (61)..(62): /note="This region represents a CpG dinucleotide"
  misc_feature (61)..(61): /note="Nucleotide may be methylated to form 5-methylcytosine"
acccttgaaccacaccacatggcctgcccagaatctgtgaacaggctgactggtgaagggcgttccctgacaaagccagtctgtaaatactggattaagtccctgcttcttcaaagtgcaca

SEQ ID NO: 23899 - DNA, 122 bp, Homo sapiens
  misc_feature (61)..(62): /note="This region represents a CpG dinucleotide"
  misc_feature (61)..(61): /note="Nucleotide may be methylated to form 5-methylcytosine"
gaccagaatagattcgttctggctcgtacttctggacaccaccagtctaaccagcaaaatcgaatatcggttctgagcttaatccttttaatagtgtttccatttacattaattgtgtcatt

SEQ ID NO: 23900 - DNA, 122 bp, Homo sapiens
  misc_feature (61)..(62): /note="This region represents a CpG dinucleotide"
  misc_feature (61)..(61): /note="Nucleotide may be methylated to form 5-methylcytosine"
tgtttgggatactctgaatcaggagactgaactggccaatgtgccaatagctttgtgtggcgctatcctagatgtcaagccagcacattaggaaggttaggaaggttagaatagattacccc

SEQ ID NO: 23901 - DNA, 122 bp, Homo sapiens
  misc_feature (61)..(62): /note="This region represents a CpG dinucleotide"
  misc_feature (61)..(61): /note="Nucleotide may be methylated to form 5-methylcytosine"
cagcccctgcatcaatattaaataattatggtgtgcttgagtgcttaccatgtcctaggtcgctgacagggtatgatcgaccaataagactgagacaggaactacagccatcaccccatttc

SEQ ID NO: 23902 - DNA, 122 bp, Homo sapiens
  misc_feature (61)..(62): /note="This region represents a CpG dinucleotide"
  misc_feature (61)..(61): /note="Nucleotide may be methylated to form 5-methylcytosine"
attccagatgaagaaacatggtctcagagaagttaagtttattttgctccttgctgttctcgaaagatttgaggtatttaacaaaagtgcttatgattcaaaaggaaaacaatacaggcttg

SEQ ID NO: 23903 - DNA, 122 bp, Homo sapiens
  misc_feature (61)..(62): /note="This region represents a CpG dinucleotide"
  misc_feature (61)..(61): /note="Nucleotide may be methylated to form 5-methylcytosine"
ataaaacccaacaacatagaaggaagcctgccttcactctgtgaagagtgtctggacaaacgagagtagtttccaaacactgatcaaggatttctcccatccacacagtaagacaccagttg

SEQ ID NO: 23904 - DNA, 122 bp, Homo sapiens
  misc_feature (61)..(62): /note="This region represents a CpG dinucleotide"
  misc_feature (61)..(61): /note="Nucleotide may be methylated to form 5-methylcytosine"
ctgggtgggagggtctggggctgtttgccgtgtctccaaggggttggggctggggctcggcggtgtgaggccctgcccttctggagcttgctggggcttgtctcctggttacagctctgccg

SEQ ID NO: 23905 - DNA, 122 bp, Homo sapiens
  misc_feature (61)..(62): /note="This region represents a CpG dinucleotide"
  misc_feature (61)..(61): /note="Nucleotide may be methylated to form 5-methylcytosine"
cctagatgtggcaatagtttgctggtttctgttcagttcctgtgttgtagtcatcccaaacgtaatgccttcgtatactgaggtacagattgcctcatgggaacataaagtactggaaacta

SEQ ID NO: 23906 - DNA, 122 bp, Homo sapiens
  misc_feature (61)..(62): /note="This region represents a CpG dinucleotide"
  misc_feature (61)..(61): /note="Nucleotide may be methylated to form 5-methylcytosine"
accttgtctcaaaaaaaagagtactagttctagacttgacacatttgaccttttagtactcgttagtactaacacacaaatcatcacctatataaaattggtctcactgcagttgagtcaaa

SEQ ID NO: 23907 - DNA, 122 bp, Homo sapiens
  misc_feature (61)..(62): /note="This region represents a CpG dinucleotide"
  misc_feature (61)..(61): /note="Nucleotide may be methylated to form 5-methylcytosine"
ttaagtcctatttttatgtcaaagtgagtattcttggttttggttaacaagtacaactgtcggcaaacaaatgtggattgtacagcagtatatatagaaggtagatactattaagagtgatg

SEQ ID NO: 23908 - DNA, 122 bp, Homo sapiens
  misc_feature (61)..(62): /note="This region represents a CpG dinucleotide"
  misc_feature (61)..(61): /note="Nucleotide may be methylated to form 5-methylcytosine"
agtgaggacgtagcctgctctgctgggaggtggctgcagggatgtggggaggatggagggcggggctgcgccagctcatctcgcctccacctgggctgagcctagtaggggtgagagggctc

SEQ ID NO: 23909 - DNA, 122 bp, Homo sapiens
  misc_feature (61)..(62): /note="This region represents a CpG dinucleotide"
  misc_feature (61)..(61): /note="Nucleotide may be methylated to form 5-methylcytosine"
tttgtgagggttagtttaaactagttaatacctattaatcactaacctggaacatgcaaacgacaacatgtagcaattctggaagctgaggacatataagggagtgccatagggccatccct

SEQ ID NO: 23910 - DNA, 122 bp, Homo sapiens
  misc_feature (61)..(62): /note="This region represents a CpG dinucleotide"
  misc_feature (61)..(61): /note="Nucleotide may be methylated to form 5-methylcytosine"
tgttagccatattcaccctaaagtgttatagaacactagaacttattcttcctacctatccgtaattttgtaagttactgttcttgagaaagttaagattcttttgaataatctgagatgtg

SEQ ID NO: 23911 - DNA, 122 bp, Homo sapiens
  misc_feature (61)..(62): /note="This region represents a CpG dinucleotide"
  misc_feature (61)..(61): /note="Nucleotide may be methylated to form 5-methylcytosine"
gcactgccagattagaatgcctcaaaggcctaatgactcctaagtggctcaccgtcagctcggtacagctaagcaattcccatgctgctcaggagtcatgtattatgctggcaggctgcctc

SEQ ID NO: 23912 - DNA, 122 bp, Homo sapiens
  misc_feature (61)..(62): /note="This region represents a CpG dinucleotide"
  misc_feature (61)..(61): /note="Nucleotide may be methylated to form 5-methylcytosine"
tatttcaccctgggctggcaggcagctgttagaggtatttacggccttgccgcagtgcggcggccaggcagccgggtagggtatgcgggggcaccggaagctggggagaagccatgaagaac

SEQ ID NO: 23913 - DNA, 122 bp, Homo sapiens
  misc_feature (61)..(62): /note="This region represents a CpG dinucleotide"
  misc_feature (61)..(61): /note="Nucleotide may be methylated to form 5-methylcytosine"
aggaagagaactgctcaacacaaaagtggacagaaaaagatcagtcttagagagtcttggcggggttagaatttatcctgttgcatgctcgatgtgatatcactaaaggatctaagcaggat

SEQ ID NO: 23914 - DNA, 122 bp, Homo sapiens
  misc_feature (61)..(62): /note="This region represents a CpG dinucleotide"
  misc_feature (61)..(61): /note="Nucleotide may be methylated to form 5-methylcytosine"
cgtgatccgcccaccttggcctcccaaagcgctgggattacaggcgtgagccaccgcgcccggccatacatggcaagtttctacatggtgtttcagacttagctgatcaccctctaccctca

SEQ ID NO: 23915 - DNA, 122 bp, Homo sapiens
  misc_feature (61)..(62): /note="This region represents a CpG dinucleotide"
  misc_feature (61)..(61): /note="Nucleotide may be methylated to form 5-methylcytosine"
aagccatgattcagacacttaagcctgtgtcagtccctatccttaggtcctggcaggctccgtgttccattccagctgagcctttgctggagtaattacccacatggagtcttcaagccaaa

SEQ ID NO: 23916 - DNA, 122 bp, Homo sapiens
  misc_feature (61)..(62): /note="This region represents a CpG dinucleotide"
  misc_feature (61)..(61): /note="Nucleotide may be methylated to form 5-methylcytosine"
ctttcgtgtcagaggctgtgagcagccgctctgctcacaccgagtggggctgaccgtgggcgctgagcagaggcagaagggtacaacccggctgtgctttttggaagggatcccggaggtgg

SEQ ID NO: 23917 - DNA, 122 bp, Homo sapiens
  misc_feature (61)..(62): /note="This region represents a CpG dinucleotide"
  misc_feature (61)..(61): /note="Nucleotide may be methylated to form 5-methylcytosine"
cctgagccaggaggaagcccaggtcgtggaccaggagctattcaacgagtactagttcagcgtggcccgacttgtggagctggccgggctgagctgcgccgcagccatcgccaaggcatatt

SEQ ID NO: 23918 - DNA, 122 bp, Homo sapiens
  misc_feature (61)..(62): /note="This region represents a CpG dinucleotide"
  misc_feature (61)..(61): /note="Nucleotide may be methylated to form 5-methylcytosine"
ttcatcaggtcctgctaggtctttgattttcttgaaagggccttctttatgccttccttccgtccccatttccaccaccctcgactaggccttcctcacctcatccggcatcagtgtgagcc

SEQ ID NO: 23919 - DNA, 122 bp, Homo sapiens
  misc_feature (61)..(62): /note="This region represents a CpG dinucleotide"
  misc_feature (61)..(61): /note="Nucleotide may be methylated to form 5-methylcytosine"
atttcagtctccttccgttcccaggtcaataaacaataggcttttccaatcttttcatgccgccaatttctggccttctctcagagccccactcctcgtggtattgtgggtttcagggtgta

SEQ ID NO: 23920 - DNA, 122 bp, Homo sapiens
  misc_feature (61)..(62): /note="This region represents a CpG dinucleotide"
  misc_feature (61)..(61): /note="Nucleotide may be methylated to form 5-methylcytosine"
gaagattctgtgtgctctttcagaccaggaggaggatgaggaggaggaaagtttatatgacgtaaattcatttgaccgtaagatatgtatttaaacatcgtggaggatcttgggggtctgat

SEQ ID NO: 23921 - DNA, 122 bp, Homo sapiens
  misc_feature (61)..(62): /note="This region represents a CpG dinucleotide"
  misc_feature (61)..(61): /note="Nucleotide may be methylated to form 5-methylcytosine"
gtttgcatttcgaagctgcaggaaatctagtcatgctggggaagtggtcgtggagtcggccgtcatgggattcccgtgggaggacctgcctgaaaagagatgagagtttctaatacattgag

SEQ ID NO: 23922 - DNA, 122 bp, Homo sapiens
  misc_feature (61)..(62): /note="This region represents a CpG dinucleotide"
  misc_feature (61)..(61): /note="Nucleotide may be methylated to form 5-methylcytosine"
tatatatggttctggtggtgtggtgcagccccaggcagggtatgggtcccaggttggttacgcttgtgaaagattattgagtaacatttgtgaaaagaggaagaagaattgggcaccagcta

SEQ ID NO: 23923 - DNA, 122 bp, Homo sapiens
  misc_feature (61)..(62): /note="This region represents a CpG dinucleotide"
  misc_feature (61)..(61): /note="Nucleotide may be methylated to form 5-methylcytosine"
agccccagaaatgacaagcgtgtcttggcagagccagcacacaagtggatgtgaagtgcccgtcttgacctcctcatcaggctgctgcaggcctctggcgggcagggcactgggagaggccc

SEQ ID NO: 23924 - DNA, 122 bp, Homo sapiens
  misc_feature (61)..(62): /note="This region represents a CpG dinucleotide"
  misc_feature (61)..(61): /note="Nucleotide may be methylated to form 5-methylcytosine"
tcttggtgctccctcagcagccgctgagccgaggccacatccactgacacctccttgctgcgcagctgagcctggacactctctgcccacagtagcagttgctggctctcttgcaggaagct

SEQ ID NO: 23925 - DNA, 122 bp, Homo sapiens
  misc_feature (61)..(62): /note="This region represents a CpG dinucleotide"
  misc_feature (61)..(61): /note="Nucleotide may be methylated to form 5-methylcytosine"
aattaataggcccaagagcaaagcagctgagctgttgctgctcccttctggccttctgcccgatgtgcaatggccccaagccaaggctaacttgcatagatgaagcaagtgtaccctcatac

SEQ ID NO: 23926 - DNA, 122 bp, Homo sapiens
  misc_feature (61)..(62): /note="This region represents a CpG dinucleotide"
  misc_feature (61)..(61): /note="Nucleotide may be methylated to form 5-methylcytosine"
gtgaggatagcccaccccaagggaagaatcaagggaggagaaacagaaacccaggaaccacgccaatggagaaaaccccaagtcaaggatcaaatagggcacttggatctctcaagttgccc

SEQ ID NO: 23927 - DNA, 122 bp, Homo sapiens
  misc_feature (61)..(62): /note="This region represents a CpG dinucleotide"
  misc_feature (61)..(61): /note="Nucleotide may be methylated to form 5-methylcytosine"
ggcctgttggaagccagcagaaagcaccacacagaggtgattatgtgccaccatctgtcacgcttcaagcctaccatacagcatggctaatcagccttggcaggatgatggatgaacagcag

SEQ ID NO: 23928 - DNA, 122 bp, Homo sapiens
  misc_feature (61)..(62): /note="This region represents a CpG dinucleotide"
  misc_feature (61)..(61): /note="Nucleotide may be methylated to form 5-methylcytosine"
ggccattttaaggaaaatctacataattcttcccaacaggcctggtacccacaaaccctgcgagtcctgtcatgctatgacaagaataaatgtgtttgtagaggtagagatggtactgttca

SEQ ID NO: 23929 - DNA, 122 bp, Homo sapiens
  misc_feature (61)..(62): /note="This region represents a CpG dinucleotide"
  misc_feature (61)..(61): /note="Nucleotide may be methylated to form 5-methylcytosine"
gctaactcttgagtataaaaatgtgttcagtgttgaggatcccaatatgagtaatatgtacgccctgtcatcatgatgggaactgacaattgaatagaagaggataagaaacagacaagaaa

SEQ ID NO: 23930 - DNA, 122 bp, Homo sapiens
  misc_feature (61)..(62): /note="This region represents a CpG dinucleotide"
  misc_feature (61)..(61): /note="Nucleotide may be methylated to form 5-methylcytosine"
tatttcaagctatacataggcatgaagtttagatgttcgcctgagttagtgtgtaacttccgtattaagtattgcaaaatgctgaaggtcagtcagttgtcttatctacaggaagaaggata

SEQ ID NO: 23931 - DNA, 122 bp, Homo sapiens
  misc_feature (61)..(62): /note="This region represents a CpG dinucleotide"
  misc_feature (61)..(61): /note="Nucleotide may be methylated to form 5-methylcytosine"
tacgaagtgggcatttaaagaggtgctgatttgatgcttgtcactgagtagcagagaggacggggatgagtatgtgtagtttacacctcaatcatgaggaagtgaagaacttgtgctgttat

SEQ ID NO: 23932 - DNA, 122 bp, Homo sapiens
  misc_feature (61)..(62): /note="This region represents a CpG dinucleotide"
  misc_feature (61)..(61): /note="Nucleotide may be methylated to form 5-methylcytosine"
acccagaagcttctgtgtcactggaggtcagtcacaagtgtttcaacatttccaacaaggcgggagcactgccactcagaagatagcaatctcgctcgttgagtacagcagggtgaagggag

SEQ ID NO: 23933 - DNA, 122 bp, Homo sapiens
  misc_feature (61)..(62): /note="This region represents a CpG dinucleotide"
  misc_feature (61)..(61): /note="Nucleotide may be methylated to form 5-methylcytosine"
tatcatgctgctacgcactttagtaccaggctctctggtggccagttctttgcaggataacgtggaataatgcttatgtaaaatatgacttccaagactaattctcaacttcagactcccca

SEQ ID NO: 23934 - DNA, 122 bp, Homo sapiens
  misc_feature (61)..(62): /note="This region represents a CpG dinucleotide"
  misc_feature (61)..(61): /note="Nucleotide may be methylated to form 5-methylcytosine"
ttttgaatgagcagttgtagagctgttgcttctgaaatgtgcccagatattaacatgttacgtataacaatcagggccagttgtcttactaacatccttgcagtcaattgaaaaggtaatct

SEQ ID NO: 23935 - DNA, 122 bp, Homo sapiens
  misc_feature (61)..(62): /note="This region represents a CpG dinucleotide"
  misc_feature (61)..(61): /note="Nucleotide may be methylated to form 5-methylcytosine"
gaaggtaggaggtaggtgaggccattctgtatttggggacagtgaggtcaccttcccactcgtgtgtgtgggcggccgatgattgatttctgtcatacctgttaccatttggtgcagtatcg

SEQ ID NO: 23936 - DNA, 122 bp, Homo sapiens
  misc_feature (61)..(62): /note="This region represents a CpG dinucleotide"
  misc_feature (61)..(61): /note="Nucleotide may be methylated to form 5-methylcytosine"
gcatcataccaggctcacctgtagttctgcctgaaccatgcaatttagggtttaattatacgctgtcttgcattgtttctactaattgttgcataggtcaatcttatactttcattcatcat

SEQ ID NO: 23937 - DNA, 122 bp, Homo sapiens
  misc_feature (61)..(62): /note="This region represents a CpG dinucleotide"
  misc_feature (61)..(61): /note="Nucleotide may be methylated to form 5-methylcytosine"
agctttgatcataataaaatagcagcaagagctcccagcacaggagccataaatggccagcgtatttcgtaagttcgcttttgttcttttcagtgctttgctcttgttgtgtataagtcagc

SEQ ID NO: 23938 - DNA, 122 bp, Homo sapiens
  misc_feature (61)..(62): /note="This region represents a CpG dinucleotide"
  misc_feature (61)..(61): /note="Nucleotide may be methylated to form 5-methylcytosine"
cacctccgggtattcacacccttatacagtcctctcccacactatactagggttagtctgcgtgacaaatacagtgcagcagaaatgttggtatgtcactcgcaggattagatcataaaggg

SEQ ID NO: 23939 - DNA, 122 bp, Homo sapiens
  misc_feature (61)..(62): /note="This region represents a CpG dinucleotide"
  misc_feature (61)..(61): /note="Nucleotide may be methylated to form 5-methylcytosine"
aagcattatggaattaacaaaaccaaccttgctgagcttaactatggaatggaagtatgacgaaaggccgtgtagtagggagcagtccacctaggtataggcaataaagggactactgtctg

SEQ ID NO: 23940 - DNA, 122 bp, Homo sapiens
  misc_feature (61)..(62): /note="This region represents a CpG dinucleotide"
  misc_feature (61)..(61): /note="Nucleotide may be methylated to form 5-methylcytosine"
accaaaaaggcaacagacaggatgattctaggtatatgaaatacttagaataggcaaatccgtagatcagaaagcagattagtggttaccagggccttagggtagggttgaaatggggagtg

SEQ ID NO: 23941 - DNA, 122 bp, Homo sapiens
  misc_feature (61)..(62): /note="This region represents a CpG dinucleotide"
  misc_feature (61)..(61): /note="Nucleotide may be methylated to form 5-methylcytosine"
aggtgagttaaagagcactagtaaatactcgcagtcatgcattgcttaacaacagggatacgttctgagaaatgagtcataggcagtttcactgttttgcgaaagaatattatgggtatact

SEQ ID NO: 23942 - DNA, 122 bp, Homo sapiens
  misc_feature (61)..(62): /note="This region represents a CpG dinucleotide"
  misc_feature (61)..(61): /note="Nucleotide may be methylated to form 5-methylcytosine"
gattacatgctttgggtgtggacgccaagaagtgacaaaaaaaggaagttgggatcattacggttaacccaagcatgttggaaaccagagagaggctgagtgctatcatacacagacccatg

SEQ ID NO: 23943 - DNA, 122 bp, Homo sapiens
  misc_feature (61)..(62): /note="This region represents a CpG dinucleotide"
  misc_feature (61)..(61): /note="Nucleotide may be methylated to form 5-methylcytosine"
actttatgaaatgaagaaacatctaaacagggttgcagaacttgtggtctatttgatcctcgttagtatagtggtgatcatcaaaaaaaaaaaaaaaagagcttgtgatctatttgaaatag

SEQ ID NO: 23944 - DNA, 122 bp, Homo sapiens
  misc_feature (61)..(62): /note="This region represents a CpG dinucleotide"
  misc_feature (61)..(61): /note="Nucleotide may be methylated to form 5-methylcytosine"
agtttgtgtcagctaagatgtggaagtctggggtgagagaggttttttgagagaaaattacgagttcagttttgaacatgttacatttgagagagcacctattcattgttatcttaagtagt

SEQ ID NO: 23945 - DNA, 122 bp, Homo sapiens
  misc_feature (61)..(62): /note="This region represents a CpG dinucleotide"
  misc_feature (61)..(61): /note="Nucleotide may be methylated to form 5-methylcytosine"
gaggtttttaatatttacaagccacagaattatttcctgcagccacagagacttccttggcgggaaaccaggtcctctgacctcacccggctctgcagtctgttttgccgttttccgcctca

SEQ ID NO: 23946 - DNA, 122 bp, Homo sapiens
  misc_feature (61)..(62): /note="This region represents a CpG dinucleotide"
  misc_feature (61)..(61): /note="Nucleotide may be methylated to form 5-methylcytosine"
gttggctcatgagttccctggcacgagagacttgaatgtgttcgtaacatgagttacagacgagaactgggtcatagagttgctgatcaggaatgggcagcttcaggtggcagcatccagca

SEQ ID NO: 23947 - DNA, 122 bp, Homo sapiens
  misc_feature (61)..(62): /note="This region represents a CpG dinucleotide"
  misc_feature (61)..(61): /note="Nucleotide may be methylated to form 5-methylcytosine"
tttgccccttgacaggtatgggccagcagtttcctgccagatattgcccagcgtgaggagcgatctcagcaggcctataagagtcagcatggagagcccctgctaatggagtacagccgcca

SEQ ID NO: 23948 - DNA, 122 bp, Homo sapiens
  misc_feature (61)..(62): /note="This region represents a CpG dinucleotide"
  misc_feature (61)..(61): /note="Nucleotide may be methylated to form 5-methylcytosine"
aaccctgggatccatgatcccacacccagggccatggtgagggtgcaccaagtgttaccacggtcagagaatacagaataaaagagtcttcagccctgggaggttagggaaggatggaagaa

SEQ ID NO: 23949 - DNA, 122 bp, Homo sapiens
  misc_feature (61)..(62): /note="This region represents a CpG dinucleotide"
  misc_feature (61)..(61): /note="Nucleotide may be methylated to form 5-methylcytosine"
tcccaggacattcactaaactgcaacaagccagaaactctactaggtgcaggatacatagcgtaaaaaaaatacagcatgtttgtgtctctgtgaagtctaccagcaagtgtctagcatgct

SEQ ID NO: 23950 - DNA, 122 bp, Homo sapiens
  misc_feature (61)..(62): /note="This region represents a CpG dinucleotide"
  misc_feature (61)..(61): /note="Nucleotide may be methylated to form 5-methylcytosine"
ctggagtgctttcctgccctaggaagccaacacattacgccaccagctgaaaccctgtggcgaagggagatagcacagactgcaatggcatgatagacaccctgccatgactttgcaaatgt

SEQ ID NO: 23951 - DNA, 122 bp, Homo sapiens
  misc_feature (61)..(62): /note="This region represents a CpG dinucleotide"
  misc_feature (61)..(61): /note="Nucleotide may be methylated to form 5-methylcytosine"
ctggtgaggggtaacacaactggtgaacagcactgaaaactcacttgagatcaatgatcacgaactgcaggtgagtcagcgcaattgcgtgcttcacccaagtcttatccagctgcagcaac

SEQ ID NO: 23952 - DNA, 122 bp, Homo sapiens
  misc_feature (61)..(62): /note="This region represents a CpG dinucleotide"
  misc_feature (61)..(61): /note="Nucleotide may be methylated to form 5-methylcytosine"
ctgcagacccacttgtgttattgtaaatgaatcagaggggcaagaccttgttctttacggcgtgtgatttaaaatcagttttaaggtacctgccaggtgtatttagaggaaaaggcatgaag

SEQ ID NO: 23953 - DNA, 122 bp, Homo sapiens
  misc_feature (61)..(62): /note="This region represents a CpG dinucleotide"
  misc_feature (61)..(61): /note="Nucleotide may be methylated to form 5-methylcytosine"
gaaaattcaccagtaccttctccgcttttgtctaaattcatctgtgagaagctttactcacgctttggctgccggtgactcacggttaaatcatctctctcaacttttttccttttcggttt

SEQ ID NO: 23954 - DNA, 122 bp, Homo sapiens
  misc_feature (61)..(62): /note="This region represents a CpG dinucleotide"
  misc_feature (61)..(61): /note="Nucleotide may be methylated to form 5-methylcytosine"
cgaggccgccggcctgttggatgatgggcacccttgtgagctggttctgggctaggccaccgtgctgggtggcagtggggacttttaggggagggatcccgggggataatgaacagaagtgt

SEQ ID NO: 23955 - DNA, 122 bp, Homo sapiens
  misc_feature (61)..(62): /note="This region represents a CpG dinucleotide"
  misc_feature (61)..(61): /note="Nucleotide may be methylated to form 5-methylcytosine"
atgcatagtgaagactgaatagccatgagcctatttatgtcagtcacatagaactaacgtcgctaaaccagtctgaaaaagaactgtaaacatggcctttggtgccagatcttgattcaaga

SEQ ID NO: 23956 - DNA, 122 bp, Homo sapiens
  misc_feature (61)..(62): /note="This region represents a CpG dinucleotide"
  misc_feature (61)..(61): /note="Nucleotide may be methylated to form 5-methylcytosine"
ttgagatcagcaccaggcaacataaagagactctgtctctacaaaaaaccctcaaaacgacgaacgcccacaaaaaccacaaaacaaatagatgtgaaggagatgaggaagtgagccctgtg

SEQ ID NO: 23957 - DNA, 122 bp, Homo sapiens
  misc_feature (61)..(62): /note="This region represents a CpG dinucleotide"
  misc_feature (61)..(61): /note="Nucleotide may be methylated to form 5-methylcytosine"
agaagacttataaagtgtgctgaagcttaccatttcagatctagacagagatgtgacatgcgctaggttgttgataaaactggtatctttccaaaagaggcatgcaagcatgtactaaaaga

SEQ ID NO: 23958 - DNA, 122 bp, Homo sapiens
  misc_feature (61)..(62): /note="This region represents a CpG dinucleotide"
  misc_feature (61)..(61): /note="Nucleotide may be methylated to form 5-methylcytosine"
agtccagccactgagaagtgtataaacatccctgatatctctggacaggtgttagtgtggcggctcagggtagaaagcaagacccaaaacaggagccaagccaagtaagggagaggtgaggg

SEQ ID NO: 23959 - DNA, 122 bp, Homo sapiens
  misc_feature (61)..(62): /note="This region represents a CpG dinucleotide"
  misc_feature (61)..(61): /note="Nucleotide may be methylated to form 5-methylcytosine"
ccagagatgcagaaccagaaagatacatacacagtcataccttgtttaacgatgggaatacgttctgagaaatgagtcatgaggttattttgtcattgtgtgaacatcagagtgtacttaca

SEQ ID NO: 23960 - DNA, 122 bp, Homo sapiens
  misc_feature (61)..(62): /note="This region represents a CpG dinucleotide"
  misc_feature (61)..(61): /note="Nucleotide may be methylated to form 5-methylcytosine"
cacacaatggctatgaaaatgcaagtagtttcctcgcgtgacctcaccatgattcacatacgtgccactgtttgaaatctggtctgtttgcatttctgttatgacagagagatgatgtttgc

SEQ ID NO: 23961 - DNA, 122 bp, Homo sapiens
  misc_feature (61)..(62): /note="This region represents a CpG dinucleotide"
  misc_feature (61)..(61): /note="Nucleotide may be methylated to form 5-methylcytosine"
tgaatatcctgaatgggcactccctctcttcctcttgtttttatttatgtatctcatcaccgtattggggaacttagagatgattattctgatcctcatggatcaccagctccacgctccaa

SEQ ID NO: 23962 - DNA, 122 bp, Homo sapiens
  misc_feature (61)..(62): /note="This region represents a CpG dinucleotide"
  misc_feature (61)..(61): /note="Nucleotide may be methylated to form 5-methylcytosine"
tagatctgtgtttgcctaactggagttgttcctgttctatctttatgatttttgccatatcgtctatattatttagcatttttatatctgtaccatctatattatttacttaacatttttct

SEQ ID NO: 23963 - DNA, 122 bp, Homo sapiens
  misc_feature (61)..(62): /note="This region represents a CpG dinucleotide"
  misc_feature (61)..(61): /note="Nucleotide may be methylated to form 5-methylcytosine"
ggtagcacagcgcttaacggtatctgcctgctccactccacggggccagaggcaccagcacgatgccgccccgactcggctctgcggtggcccctgtgggcctgcccttcctttagctccag

SEQ ID NO: 23964 - DNA, 122 bp, Homo sapiens
  misc_feature (61)..(62): /note="This region represents a CpG dinucleotide"
  misc_feature (61)..(61): /note="Nucleotide may be methylated to form 5-methylcytosine"
aacctacagaaacagatttgccagggcaggggtatggacactgtgttttaaagcctcacacgtgatgctgcagcagcttagccagcatggagcaggtcagcattaagtacccactgtcttcg

SEQ ID NO: 23965 - DNA, 122 bp, Homo sapiens
  misc_feature (61)..(62): /note="This region represents a CpG dinucleotide"
  misc_feature (61)..(61): /note="Nucleotide may be methylated to form 5-methylcytosine"
cataagggttctgaggattaaatgagatcacacttgtaaagcatttagcatattgaccggcgcatggcaagtactttgaaaaacagaagccagtcagcaataggaagtggtttcttacttat

SEQ ID NO: 23966 - DNA, 122 bp, Homo sapiens
  misc_feature (61)..(62): /note="This region represents a CpG dinucleotide"
  misc_feature (61)..(61): /note="Nucleotide may be methylated to form 5-methylcytosine"
aaaagagaagaaaaggaatcattgctctagcccccaggagtgctgctgttggtagacagccgtaccctggcagctcctccagggatgagcttagctggggacagctgccttgcccacagtca

SEQ ID NO: 23967 - DNA, 122 bp, Homo sapiens
  misc_feature (61)..(62): /note="This region represents a CpG dinucleotide"
  misc_feature (61)..(61): /note="Nucleotide may be methylated to form 5-methylcytosine"
agtaggatcaggcaaataaaactagttggacagcagacatatcatgaactcttgcaacagcgtgttatctgtgtgcatgtctaaagtgttatactgattcactattacaataaggatcatgc

SEQ ID NO: 23968 - DNA, 122 bp, Homo sapiens
  misc_feature (61)..(62): /note="This region represents a CpG dinucleotide"
  misc_feature (61)..(61): /note="Nucleotide may be methylated to form 5-methylcytosine"
gtataagtgatgtggtgagttctaggtatagcccttaactagtttggcaggttgctgcctcggagccacaaactgctatgtaagaagtccaggctactttgctgaagagacaggccaaatag

SEQ ID NO: 23969 - DNA, 122 bp, Homo sapiens
  misc_feature (61)..(62): /note="This region represents a CpG dinucleotide"
  misc_feature (61)..(61): /note="Nucleotide may be methylated to form 5-methylcytosine"
cagactgtgcttcgggaagctgggtgtgagctgttgagtggccagttctcaagatgctgacggatacactgaggtcagcaaaattgcctatgattctggaaggcatgctggctcctgccctg

SEQ ID NO: 23970 - DNA, 122 bp, Homo sapiens
  misc_feature (61)..(62): /note="This region represents a CpG dinucleotide"
  misc_feature (61)..(61): /note="Nucleotide may be methylated to form 5-methylcytosine"
gactgtggcttagtgtggctcatgaggggatgcacagagcattatcagtatggagacacacgcttccagctcatgatgagctgagtgcagagcaggagcagtgacaatggtaaggccttgaa

SEQ ID NO: 23971 - DNA, 122 bp, Homo sapiens
  misc_feature (61)..(62): /note="This region represents a CpG dinucleotide"
  misc_feature (61)..(61): /note="Nucleotide may be methylated to form 5-methylcytosine"
agtcagtttattgtgcctcctaaaattcacacagatggtttttgtcccccccgccatcaacgaaagccctaagctgaagagtaggtacattatcactagcaagttatgtgaccttgagcaag

SEQ ID NO: 23972 - DNA, 122 bp, Homo sapiens
  misc_feature (61)..(62): /note="This region represents a CpG dinucleotide"
  misc_feature (61)..(61): /note="Nucleotide may be methylated to form 5-methylcytosine"
gcagagagcagggcggggcccagcctccagagccagggtccgagcagggtccgtcctccccgtcattcatccctggggccaggagctgctttcagggacacctgcctctgggccacagagat

SEQ ID NO: 23973 - DNA, 122 bp, Homo sapiens
  misc_feature (61)..(62): /note="This region represents a CpG dinucleotide"
  misc_feature (61)..(61): /note="Nucleotide may be methylated to form 5-methylcytosine"
ccaggccagtggttcccaaatgccgatcaaggacagcaagaattactgagttctaaaacccgccagcagatagtctgattcagtggctgaagacattttattttttaaacaagcaactcatc

SEQ ID NO: 23974 - DNA, 122 bp, Homo sapiens
  misc_feature (61)..(62): /note="This region represents a CpG dinucleotide"
  misc_feature (61)..(61): /note="Nucleotide may be methylated to form 5-methylcytosine"
tatagtcaaggatggaagcaggaggataatagagttgcagtgcgtatgctaaacaaaagacgactttcattccaaggaaatgagatagagacagcacgagtcttacttctgttgttttccat

SEQ ID NO: 23975 - DNA, 122 bp, Homo sapiens
  misc_feature (61)..(62): /note="This region represents a CpG dinucleotide"
  misc_feature (61)..(61): /note="Nucleotide may be methylated to form 5-methylcytosine"
ctgcctcgtgaactagacagcagatatcttattacttgcacttaacatggggcagcctagcgattgagtaactgggttgggttggcaacagctacccggcttcacttatgaataatagtaat

SEQ ID NO: 23976 - DNA, 122 bp, Homo sapiens
  misc_feature (61)..(62): /note="This region represents a CpG dinucleotide"
  misc_feature (61)..(61): /note="Nucleotide may be methylated to form 5-methylcytosine"
ttattctagtaattattgggttcccccttgctcacatggttactcacacttgaaagtttgcggtaacaagaaggagccttggcaggaagtttgtttgttccatgactgcttttactgtcaca

SEQ ID NO: 23977 - DNA, 122 bp, Homo sapiens
  misc_feature (61)..(62): /note="This region represents a CpG dinucleotide"
  misc_feature (61)..(61): /note="Nucleotide may be methylated to form 5-methylcytosine"
gtaataggtggtgcagccaggatgaatgtctgggcagctgccagggcccacattcttaggcgctacatggaactgcgcagtacatggaggcttggagtggatcaatcagaagggcttcctga

SEQ ID NO: 23978 - DNA, 122 bp, Homo sapiens
  misc_feature (61)..(62): /note="This region represents a CpG dinucleotide"
  misc_feature (61)..(61): /note="Nucleotide may be methylated to form 5-methylcytosine"
attctcaggagatgcaaatcactactgaaagctcaaaccatcagaaatttctttacaatacgttccccaggatttccaggttgtgttgttgcaatggatttggtttaagtaatggttctcaa

SEQ ID NO: 23979 - DNA, 122 bp, Homo sapiens
  misc_feature (61)..(62): /note="This region represents a CpG dinucleotide"
  misc_feature (61)..(61): /note="Nucleotide may be methylated to form 5-methylcytosine"
accacatcctgttttatcagccaggtctttgtgacctgaagcttgtgataccggtcctgccgaactcctatcccatcctgtgacaaaggatgcttaacctcctgggaatgcagcccagcaag

SEQ ID NO: 23980 - DNA, 122 bp, Homo sapiens
  misc_feature (61)..(62): /note="This region represents a CpG dinucleotide"
  misc_feature (61)..(61): /note="Nucleotide may be methylated to form 5-methylcytosine"
acctgctaatacctcaaacccttgttataagctcgataaacttgtgctatgtgctggtaacgagcagctaacgattgctcaggtgtttatattaaacagattaatcgaggacacagtcgatg

SEQ ID NO: 23981 - DNA, 122 bp, Homo sapiens
  misc_feature (61)..(62): /note="This region represents a CpG dinucleotide"
  misc_feature (61)..(61): /note="Nucleotide may be methylated to form 5-methylcytosine"
acactggggctgatgttgtaaccctgcttctaaactggatgcttggtagcatgggtaatacgtattaccattggggtgattttcctgccacttgaatgtgaaatggactagatccacagata

SEQ ID NO: 23982 - DNA, 122 bp, Homo sapiens
  misc_feature (61)..(62): /note="This region represents a CpG dinucleotide"
  misc_feature (61)..(61): /note="Nucleotide may be methylated to form 5-methylcytosine"
gctgtttgagttaaaggcaaacaaaaaacccctgctgaaagtaccttcttggttccatcacggtttggtctttcagttgtttataagagcagatggcacactgttattcgtaagtgttttaa

SEQ ID NO: 23983 - DNA, 122 bp, Homo sapiens
  misc_feature (61)..(62): /note="This region represents a CpG dinucleotide"
  misc_feature (61)..(61): /note="Nucleotide may be methylated to form 5-methylcytosine"
ggctgcaggatatggtggagagacagccttgatgtcatgcttgactgggcatggcagacccgtgacttccttgctgtgtaacctgagcttagttaagttactgggcctcagtgagtctcagg

SEQ ID NO: 23984 - DNA, 122 bp, Homo sapiens
  misc_feature (61)..(62): /note="This region represents a CpG dinucleotide"
  misc_feature (61)..(61): /note="Nucleotide may be methylated to form 5-methylcytosine"
taactactgagggcgtcaggaaccagtaaggggatgatggcagcggcgggcggtccgaagcggcctctgccagggcccccgctgcggtggggtgcgggcgcgggccgtgggtcctcgggtgc

SEQ ID NO: 23985 - DNA, 122 bp, Homo sapiens
  misc_feature (61)..(62): /note="This region represents a CpG dinucleotide"
  misc_feature (61)..(61): /note="Nucleotide may be methylated to form 5-methylcytosine"
cctcttctgctcccttcacaacactgtcagagcaatggctatgttgaggagctgagctcgcgggtgctatatttaaccagtgttctcagcaagtcaagcctgtcaacagctgagaagtttgg

SEQ ID NO: 23986 - DNA, 122 bp, Homo sapiens
  misc_feature (61)..(62): /note="This region represents a CpG dinucleotide"
  misc_feature (61)..(61): /note="Nucleotide may be methylated to form 5-methylcytosine"
gggagtaatgaggactgagtcacttaggaacagccaagaggccactcctgggcagcttagcgcaatcagcaccctgtgtgaaataataaccacttctactgaggactcccagtgtgccggcc

SEQ ID NO: 23987 - DNA, 122 bp, Homo sapiens
  misc_feature (61)..(62): /note="This region represents a CpG dinucleotide"
  misc_feature (61)..(61): /note="Nucleotide may be methylated to form 5-methylcytosine"
cccacaaggcatattcaaggactgagtccccatctggagcttgaggtccttgttcaagctcgtgtagttgtaggagaattcactccctagaagttacagggcggaggcctttggctcctaga

SEQ ID NO: 23988 - DNA, 122 bp, Homo sapiens
  misc_feature (61)..(62): /note="This region represents a CpG dinucleotide"
  misc_feature (61)..(61): /note="Nucleotide may be methylated to form 5-methylcytosine"
atgattgtccatcacgcaatggctgacgtctaccattcaccaggtctgtttacgagcgcacgcccagatttcattaacaggggcatgacatccaggagtgggcctgccacagatggccagtc

SEQ ID NO: 23989 - DNA, 122 bp, Homo sapiens
  misc_feature (61)..(62): /note="This region represents a CpG dinucleotide"
  misc_feature (61)..(61): /note="Nucleotide may be methylated to form 5-methylcytosine"
agatttttctgtaggaatgtcactgctggtacatgggcaaggcacatacacccacacacacgtgggcaaacacaagctcaagggtgtgtacacgtgttgattcacacataaacaagcaaaca

SEQ ID NO: 23990 - DNA, 122 bp, Homo sapiens
  misc_feature (61)..(62): /note="This region represents a CpG dinucleotide"
  misc_feature (61)..(61): /note="Nucleotide may be methylated to form 5-methylcytosine"
aaacagtggcatcaatctaccctgtatgaattttcagttcatgcagcactgtggtactaccgaatgggtttgatgaaaagatgaagggacaagaaataataccagttaatctctaatgagca

SEQ ID NO: 23991 - DNA, 122 bp, Homo sapiens
  misc_feature (61)..(62): /note="This region represents a CpG dinucleotide"
  misc_feature (61)..(61): /note="Nucleotide may be methylated to form 5-methylcytosine"
ctgtgccaagacccctattgatgtcctctgtgcagctgtggagctgttgcatgaagctgacgccctcctcttctggctcagcaggtacccgggttggggtgacgagtgagggactattgtca

SEQ ID NO: 23992 - DNA, 122 bp, Homo sapiens
  misc_feature (61)..(62): /note="This region represents a CpG dinucleotide"
  misc_feature (61)..(61): /note="Nucleotide may be methylated to form 5-methylcytosine"
cagccatttagtgagtgctactgatgaggaaactgaagcttagtgaagttaggtaattcacgcaggccacagatggccaagcagtctgaccccacttagtctgaccccaaaatgcaagcatc

SEQ ID NO: 23993 - DNA, 122 bp, Homo sapiens
  misc_feature (61)..(62): /note="This region represents a CpG dinucleotide"
  misc_feature (61)..(61): /note="Nucleotide may be methylated to form 5-methylcytosine"
caccagtttaggaggagcatggcagatttaaaatctcttttcaccccttttcaagctcagcgctgtttcctcttactctagacccctgcatcccttctgctccccccaacctagagcccctg

SEQ ID NO: 23994 - DNA, 122 bp, Homo sapiens
  misc_feature (61)..(62): /note="This region represents a CpG dinucleotide"
  misc_feature (61)..(61): /note="Nucleotide may be methylated to form 5-methylcytosine"
gcctcatcctgccacatctgcactctggcaggagccgcctccctgctggcctccctgcttcgagtcatggccacctctagcctcatggtttggaaagcctatacagactaccttgattacat

SEQ ID NO: 23995 - DNA, 122 bp, Homo sapiens
  misc_feature (61)..(62): /note="This region represents a CpG dinucleotide"
  misc_feature (61)..(61): /note="Nucleotide may be methylated to form 5-methylcytosine"
gtggttctgagacagttacaggagtgctgtgcgtcacaggaggggccggaggcgctgctacggttcacagaggagagaaaggacaagtcatcatcacatcactgcatgggatttcagagcgt

SEQ ID NO: 23996 - DNA, 122 bp, Homo sapiens
  misc_feature (61)..(62): /note="This region represents a CpG dinucleotide"
  misc_feature (61)..(61): /note="Nucleotide may be methylated to form 5-methylcytosine"
cagaccacagcagcgcaggatgatgtgggctggcccctcacctccaggagggaggtctgacgatggcattttgtctgagatgcccgtatcatcactcaggctcgtcatgaggacgggccgca

SEQ ID NO: 23997 - DNA, 122 bp, Homo sapiens
  misc_feature (61)..(62): /note="This region represents a CpG dinucleotide"
  misc_feature (61)..(61): /note="Nucleotide may be methylated to form 5-methylcytosine"
atagcagagaccagtagcttctgtgacattttctgattagtcagatcagaacttgtaattcgtttggtgtcagcctagccacgaatgagagaactttcctgtcattctgcacctctttgaag

SEQ ID NO: 23998 - DNA, 122 bp, Homo sapiens
  misc_feature (61)..(62): /note="This region represents a CpG dinucleotide"
  misc_feature (61)..(61): /note="Nucleotide may be methylated to form 5-methylcytosine"
ggcccccttcatagtgttgtttaggaagattgagtgaaatgagcaaaatcctcaggcaagcgagaggcacatggtatgtgcttattaagcattagctgtagtattgtcacgtctttgctcta

SEQ ID NO: 23999 - DNA, 122 bp, Homo sapiens
  misc_feature (61)..(62): /note="This region represents a CpG dinucleotide"
  misc_feature (61)..(61): /note="Nucleotide may be methylated to form 5-methylcytosine"
tctttctcagcttgccactcctctctatcttcagttgcccatttgcagtgatgaatgactcgtttctcaaccagttccttggtgcccttggcctcaatattattgtttttgaaagtaattgt

SEQ ID NO: 24000 - DNA, 122 bp, Homo sapiens
  misc_feature (61)..(62): /note="This region represents a CpG dinucleotide"
  misc_feature (61)..(61): /note="Nucleotide may be methylated to form 5-methylcytosine"
cctgccctctttctcactcactccagccccactggcctccctgcagttcctccagcacaccgggcaggctcccacctcagggccccagtccgagctgttccctctacttggaatgctgttct

SEQ ID NO: 24001 - DNA, 122 bp, Homo sapiens
  misc_feature (61)..(62): /note="This region represents a CpG dinucleotide"
  misc_feature (61)..(61): /note="Nucleotide may be methylated to form 5-methylcytosine"
gctgcagggacactgtgtaggctctgtgccctggtctgcatcagaggctggggcctggggcgccccagtggggacttgcagacgatagctttagctgttgaaaggctgcagtgaaaacacca

SEQ ID NO: 24002 - DNA, 122 bp, Homo sapiens
  misc_feature (61)..(62): /note="This region represents a CpG dinucleotide"
  misc_feature (61)..(61): /note="Nucleotide may be methylated to form 5-methylcytosine"
ttcctcccaccggaggctgcgctcgtatggaggggcccaccgtggtccgccctcgctggacggccctgagctccagcgttggacattcagtccagcctgatttacacctgtttgccatacat

SEQ ID NO: 24003 - DNA, 122 bp, Homo sapiens
  misc_feature (61)..(62): /note="This region represents a CpG dinucleotide"
  misc_feature (61)..(61): /note="Nucleotide may be methylated to form 5-methylcytosine"
ctgatggctgggaccccatctctgatggagcaaggcttctgatacccaactgaggcttggcgccaaggactgacatcaaggaagtggattcctgcaaacctggcacccgagggtccacttcc

SEQ ID NO: 24004 - DNA, 122 bp, Homo sapiens
  misc_feature (61)..(62): /note="This region represents a CpG dinucleotide"
  misc_feature (61)..(61): /note="Nucleotide may be methylated to form 5-methylcytosine"
taacagtgccagaccatttcatgccctgcaggtgttgctgcttctgtcactgctgctgaccgctctgccttcctgcaccaatgggcaaagcaagagaaacttagggaaaagcaaaggtagag

SEQ ID NO: 24005 - DNA, 122 bp, Homo sapiens
  misc_feature (61)..(62): /note="This region represents a CpG dinucleotide"
  misc_feature (61)..(61): /note="Nucleotide may be methylated to form 5-methylcytosine"
tcattacagggctgcagtgaatagccagtacttctttcccattggtcaagttgctgtgctcgctaagcagcaactgctcaggtcaggtgagagtggtcattattgaggaaataaaggttggg

SEQ ID NO: 24006 - DNA, 122 bp, Homo sapiens
  misc_feature (61)..(62): /note="This region represents a CpG dinucleotide"
  misc_feature (61)..(61): /note="Nucleotide may be methylated to form 5-methylcytosine"
cttatcaggacatatacctaccccacccctgcccagtgcctgttattattcctagtacaccgcaggagtaatgtatataaaattgctctactgaattgcctggataaactcagcctttaagc

SEQ ID NO: 24007 - DNA, 122 bp, Homo sapiens
  misc_feature (61)..(62): /note="This region represents a CpG dinucleotide"
  misc_feature (61)..(61): /note="Nucleotide may be methylated to form 5-methylcytosine"
ggcagcaaggagctgagtgtacacaaatgagtctgatgtgaggcaggaaatgttaggtgacgtacatgaaaaaccagcaaaacaggacaggtttcagagcaggagagagtgcttctcttgag

SEQ ID NO: 24008 - DNA, 122 bp, Homo sapiens
  misc_feature (61)..(62): /note="This region represents a CpG dinucleotide"
  misc_feature (61)..(61): /note="Nucleotide may be methylated to form 5-methylcytosine"
taactttcattccatttggctcaggtgtcagggatctatatttaacttgtgttaggcatgcgtccgaagagctggaaggctgaggatgtcaatggctttcagatgtcaggataaccttaagg

SEQ ID NO: 24009 - DNA, 122 bp, Homo sapiens
  misc_feature (61)..(62): /note="This region represents a CpG dinucleotide"
  misc_feature (61)..(61): /note="Nucleotide may be methylated to form 5-methylcytosine"
atctatttcaattatcccacttattagcatttccagcttttcccatttgctaataagaaccggagctctgggttgaggtaatcccttcagaagttaaatcattttgtgtattcagtaaccag

SEQ ID NO: 24010 - DNA, 122 bp, Homo sapiens
  misc_feature (61)..(62): /note="This region represents a CpG dinucleotide"
  misc_feature (61)..(61): /note="Nucleotide may be methylated to form 5-methylcytosine"
gagactgtgatttccagcaatttattcatttcagaaaaatgctgctgctactcagatgcccggagaagttcattagaacaggattttcctgtaatgcctccaggtcaccaggtcactgcagc

SEQ ID NO: 24011 - DNA, 122 bp, Homo sapiens
  misc_feature (61)..(62): /note="This region represents a CpG dinucleotide"
  misc_feature (61)..(61): /note="Nucleotide may be methylated to form 5-methylcytosine"
tctcaataaacaaattccctctaactgtataatcctatttctttctgctgtaggcctgagcgtttgtctggtttgttattcaaatgaagcatgactcatttaggatttaccagcttgctccg

SEQ ID NO: 24012 - DNA, 122 bp, Homo sapiens
  misc_feature (61)..(62): /note="This region represents a CpG dinucleotide"
  misc_feature (61)..(61): /note="Nucleotide may be methylated to form 5-methylcytosine"
tttcttccaggggctggtgtccaaaagcagaggtggagcgtgcctgacaaacaggccacgcgggggccctggagagggccacctcgcacccaccctggttgcacctacagcacccaaggtcc

SEQ ID NO: 24013 - DNA, 122 bp, Homo sapiens
  misc_feature (61)..(62): /note="This region represents a CpG dinucleotide"
  misc_feature (61)..(61): /note="Nucleotide may be methylated to form 5-methylcytosine"
tcgagggacacggacaggcagggggccggcagctccgcgcccagcaggcgccagggcagccgcacccccacacgcagtcagaggcatcgcctgttggcgacgaagcccaccccatggccagt

SEQ ID NO: 24014 - DNA, 122 bp, Homo sapiens
  misc_feature (61)..(62): /note="This region represents a CpG dinucleotide"
  misc_feature (61)..(61): /note="Nucleotide may be methylated to form 5-methylcytosine"
ccacaggacctgcagctgaacgaagttgaagacaactcaggagatctgttggaaagagaacgatagaggaaaatatatgaatgttgccatctttaggtgagtggacaagatttctacttcct

SEQ ID NO: 24015 - DNA, 122 bp, Homo sapiens
  misc_feature (61)..(62): /note="This region represents a CpG dinucleotide"
  misc_feature (61)..(61): /note="Nucleotide may be methylated to form 5-methylcytosine"
gccctattaatcgcattcccacctgcctttggccctcccagctgcctcgcttgcagaacacgatcgttcaaacggaagtcattcatgggatcgcctctccctgcagtaatccagagcagaat

SEQ ID NO: 24016 - DNA, 122 bp, Homo sapiens
  misc_feature (61)..(62): /note="This region represents a CpG dinucleotide"
  misc_feature (61)..(61): /note="Nucleotide may be methylated to form 5-methylcytosine"
gtattgtgtgcaaacggtgatatgagggtagcctgagtcatatgaactccctgggaaaaacgaccagctttgtgtatgtagcaagtggacttggtactcctattacctaaaaagagcctctg

SEQ ID NO: 24017 - DNA, 122 bp, Homo sapiens
  misc_feature (61)..(62): /note="This region represents a CpG dinucleotide"
  misc_feature (61)..(61): /note="Nucleotide may be methylated to form 5-methylcytosine"
tctgcagtctcaggttctctcgtcaggctcagtttcaaaactgactggtgcggaggaaagcgagctgcagtgtgtcctgaggtacagacctcccgctttaaaaagcacattctcagattgtt

SEQ ID NO: 24018 - DNA, 122 bp, Homo sapiens
  misc_feature (61)..(62): /note="This region represents a CpG dinucleotide"
  misc_feature (61)..(61): /note="Nucleotide may be methylated to form 5-methylcytosine"
tctccatcttccctctgctcacctccacggactgagtcatccttcaggccttcctttggacgtcactttctcagggaagctgccctgaccgcccatgtttagcatgtaggttcattcctgcc

SEQ ID NO: 24019 - DNA, 122 bp, Homo sapiens
  misc_feature (61)..(62): /note="This region represents a CpG dinucleotide"
  misc_feature (61)..(61): /note="Nucleotide may be methylated to form 5-methylcytosine"
aaacaatgctgggggctctgcattcccaggaagcagcaattcctgggagcaaggttgtggcgccccctacagacagggcatgtacttcaaacacccctgcttagcatatttatactacttct

SEQ ID NO: 24020 - DNA, 122 bp, Homo sapiens
  misc_feature (61)..(62): /note="This region represents a CpG dinucleotide"
  misc_feature (61)..(61): /note="Nucleotide may be methylated to form 5-methylcytosine"
gcttctagctgtccaggctccgccccctgtgagtgtgtaagtgtgtgatgctgccgcggccgccgccgccgcctgtgcagccgctgccgccgccgccgccgccgccgccgccgccgccgccg

SEQ ID NO: 24021 - DNA, 122 bp, Homo sapiens
  misc_feature (61)..(62): /note="This region represents a CpG dinucleotide"
  misc_feature (61)..(61): /note="Nucleotide may be methylated to form 5-methylcytosine"
ctaaccttatcatcacctacaatcaacccttaatcaaaactctgagctttaactttggcacgatgattttgatggactttgtggattttatttttaaggaattgacttagtggacttaaccc

SEQ ID NO: 24022 - DNA, 122 bp, Homo sapiens
  misc_feature (61)..(62): /note="This region represents a CpG dinucleotide"
  misc_feature (61)..(61): /note="Nucleotide may be methylated to form 5-methylcytosine"
ttggggcagagggagcccggttcctcacacatagcacagtcttgctaagtgaattgtgttcgccaattacttagccattgttgtgtacaccaacactctattagcaattctaagggaaatga

SEQ ID NO: 24023 - DNA, 122 bp, Homo sapiens
  misc_feature (61)..(62): /note="This region represents a CpG dinucleotide"
  misc_feature (61)..(61): /note="Nucleotide may be methylated to form 5-methylcytosine"
taaggatgggctctttgacaggcagagctgtcccatgatagaactgatggccctcaatgacgtgggttcctggtctctggaggagcccagcgaagctgcaggatctcttggcaggaggctgc

SEQ ID NO: 24024 - DNA, 122 bp, Homo sapiens
  misc_feature (61)..(62): /note="This region represents a CpG dinucleotide"
  misc_feature (61)..(61): /note="Nucleotide may be methylated to form 5-methylcytosine"
tcatgacattacaagaaaaagttgaattgcttcatatgaactgtaggttgatgtctgcagcggtggttgcccaccacttcagatagatgattcatctcatagatggggatcttgcaaactta

SEQ ID NO: 24025 - DNA, 122 bp, Homo sapiens
  misc_feature (61)..(62): /note="This region represents a CpG dinucleotide"
  misc_feature (61)..(61): /note="Nucleotide may be methylated to form 5-methylcytosine"
ctccgcggagtgggggggcctatgctttcctcttctggctcccatggcatctctatttttcgggtttaggaggcaacatttaccagtgaggctgaagcaactcagcaggatctccctggggc

SEQ ID NO: 24026 - DNA, 122 bp, Homo sapiens
  misc_feature (61)..(62): /note="This region represents a CpG dinucleotide"
  misc_feature (61)..(61): /note="Nucleotide may be methylated to form 5-methylcytosine"
tccctctcctatgcctctttcctcccctttacccttcaggagttgagtagcatcagaaaacgctgcagctagccccaaggtactgcactctgtcttgtagtttgaaaatgctacctttgtta

SEQ ID NO: 24027 - DNA, 122 bp, Homo sapiens
  misc_feature (61)..(62): /note="This region represents a CpG dinucleotide"
  misc_feature (61)..(61): /note="Nucleotide may be methylated to form 5-methylcytosine"
ccgcaccaggactgcccttcaacttgctgccacacacccgtcgagggcgcactggcctaacgtagtttagaacaaaggcattgcctactgcaggcatggttataccagggaatgacaataaa

SEQ ID NO: 24028 - DNA, 122 bp, Homo sapiens
  misc_feature (61)..(62): /note="This region represents a CpG dinucleotide"
  misc_feature (61)..(61): /note="Nucleotide may be methylated to form 5-methylcytosine"
gcctctcttggaaagttgatctccctgcttttcttctcctctgtttcatgccatgaatttcgcactaacagtcctcccccatccagggtccagccagcctcttgcttgctaaggcagaggaa

SEQ ID NO: 24029 - DNA, 122 bp, Homo sapiens
  misc_feature (61)..(62): /note="This region represents a CpG dinucleotide"
  misc_feature (61)..(61): /note="Nucleotide may be methylated to form 5-methylcytosine"
gccttctcactccattctatttccctcctcagggctttgtgcttaggaagctctgttaatcgtttttgttggctggctaactttgtgccatggggccaagaggaaaagaaagcattttttat

SEQ ID NO: 24030 - DNA, 122 bp, Homo sapiens
  misc_feature (61)..(62): /note="This region represents a CpG dinucleotide"
  misc_feature (61)..(61): /note="Nucleotide may be methylated to form 5-methylcytosine"
cactgtttaagtgaaggcctttccttttagaacactgctttacaatgcctaatcagccggcgctcaggttggtgcattcagagacccgagcgtttgtgttcctaataagtttgctagaatgt

SEQ ID NO: 24031 - DNA, 122 bp, Homo sapiens
  misc_feature (61)..(62): /note="This region represents a CpG dinucleotide"
  misc_feature (61)..(61): /note="Nucleotide may be methylated to form 5-methylcytosine"
tgctgggcacctgggacaccacttctctgggacacattgccttctgttttctccagcatgcgcttgctccagctcctgttcagggccagccctgccaccctgctcctggttctctgcctgca

SEQ ID NO: 24032 - DNA, 122 bp, Homo sapiens
  misc_feature (61)..(62): /note="This region represents a CpG dinucleotide"
  misc_feature (61)..(61): /note="Nucleotide may be methylated to form 5-methylcytosine"
cagaaatctcaacccttgggagcccttgggtggggcctgggcaggtccctgggcagtagccgtctgtagtgggcggctcatctgctgacaacagtatgacgaacaaatagcattttgtaccc

SEQ ID NO: 24033 - DNA, 122 bp, Homo sapiens
  misc_feature (61)..(62): /note="This region represents a CpG dinucleotide"
  misc_feature (61)..(61): /note="Nucleotide may be methylated to form 5-methylcytosine"
atgccagccatttcacagagttgccatgaagatgaaatcattcaagccaaaagtgcctgccgcataatagatgctcaatgtatgtttcttgagcagatacatgtaacttatggcactttaca

SEQ ID NO: 24034 - DNA, 122 bp, Homo sapiens
  misc_feature (61)..(62): /note="This region represents a CpG dinucleotide"
  misc_feature (61)..(61): /note="Nucleotide may be methylated to form 5-methylcytosine"
gcaggcagcgactggggctgagattcagggtgactgcataagggattaacttgaacaacccgtgttctctctataaggccctgcctgcctgctgggcacctcttagggtaagggccagcatt

SEQ ID NO: 24035 - DNA, 122 bp, Homo sapiens
  misc_feature (61)..(62): /note="This region represents a CpG dinucleotide"
  misc_feature (61)..(61): /note="Nucleotide may be methylated to form 5-methylcytosine"
acaatctgctgtaaatgcctctacagagccagatgtcacccaattctggatgacatgtctcggcagcatttaggttcttccctatccagcctaagtgctactctcccagacaaacgaccctg

SEQ ID NO: 24036 - DNA, 122 bp, Homo sapiens
  misc_feature (61)..(62): /note="This region represents a CpG dinucleotide"
  misc_feature (61)..(61): /note="Nucleotide may be methylated to form 5-methylcytosine"
agcagcctcgctgtcaggccacatggctggatcacatcctgttcatccaggagtgcaccacggcctgtctcgtctgtaacagataaggtccttggcttagtgagtacttttgcttttcttaa

SEQ ID NO: 24037 - DNA, 122 bp, Homo sapiens
  misc_feature (61)..(62): /note="This region represents a CpG dinucleotide"
  misc_feature (61)..(61): /note="Nucleotide may be methylated to form 5-methylcytosine"
actcctgaatagtaaaagtggattatagctgacagggctgcaaggcttagattctatttacgaaggagtttctaaggaaactcaaagacaacagaggaggcaaacacaaggactttagaaga

SEQ ID NO: 24038 - DNA, 122 bp, Homo sapiens
  misc_feature (61)..(62): /note="This region represents a CpG dinucleotide"
  misc_feature (61)..(61): /note="Nucleotide may be methylated to form 5-methylcytosine"
cagacattttcttgcagctgcaggcatcccccaaccctccctgtataagcttctcgcttccgtatcttagtgggcctaaacggaaaggaatgtacttattaagtctcacagtttttactggg

SEQ ID NO: 24039 - DNA, 122 bp, Homo sapiens
  misc_feature (61)..(62): /note="This region represents a CpG dinucleotide"
  misc_feature (61)..(61): /note="Nucleotide may be methylated to form 5-methylcytosine"
aagtgattgagatcacccagggaagcttgctgagtgagaagaggaagtctagggctgagccgtaagcaaatgccaacatccaatgggcagcaggaaggaccctgcaaaacagtgtgagatgc

SEQ ID NO: 24040 - DNA, 122 bp, Homo sapiens
  misc_feature (61)..(62): /note="This region represents a CpG dinucleotide"
  misc_feature (61)..(61): /note="Nucleotide may be methylated to form 5-methylcytosine"
ataaaagcaaggacaatatttccttgcaagtccacaaatcaccatcataagcaaggcaatcgtgaataaactgagctggactgcatagcctctttggcagttgctagtatttaaatatggat

SEQ ID NO: 24041 - DNA, 122 bp, Homo sapiens
  misc_feature (61)..(62): /note="This region represents a CpG dinucleotide"
  misc_feature (61)..(61): /note="Nucleotide may be methylated to form 5-methylcytosine"
caagaaaataacaattttaattatttgagaatggacaacttcctgtgtctggtatgttaacgagtgaatctatagtgtcagtctggtaggagagtatggtagaatagtcattaatgtctttc

SEQ ID NO: 24042 - DNA, 122 bp, Homo sapiens
  misc_feature (61)..(62): /note="This region represents a CpG dinucleotide"
  misc_feature (61)..(61): /note="Nucleotide may be methylated to form 5-methylcytosine"
ctggcacagagactccagccttgccggcctctcgcctcccaagcacagaagcctccagaacgctgcttcaaggacaagcccaggagacctgccatgctcatgcgtgtctttggaaacaggtt

SEQ ID NO: 24043 - DNA, 122 bp, Homo sapiens
  misc_feature (61)..(62): /note="This region represents a CpG dinucleotide"
  misc_feature (61)..(61): /note="Nucleotide may be methylated to form 5-methylcytosine"
cgggccagagtggctcagcgagtttaggacacaggcgcatattccacttgttatgtaacccgtttatgtaagttcatacttggatctgagccactattgtctgtagaaggtataactgccct

SEQ ID NO: 24044 - DNA, 122 bp, Homo sapiens
  misc_feature (61)..(62): /note="This region represents a CpG dinucleotide"
  misc_feature (61)..(61): /note="Nucleotide may be methylated to form 5-methylcytosine"
ttgtcttattatttagtcataaaaactgatatttgtaatagaaaatagattgtgtatttgcgaggtactttgcttattatctgcatagcattctttaatgaagttacaattttcaatgagag

SEQ ID NO: 24045 - DNA, 122 bp, Homo sapiens
  misc_feature (61)..(62): /note="This region represents a CpG dinucleotide"
  misc_feature (61)..(61): /note="Nucleotide may be methylated to form 5-methylcytosine"
agctgcctaaatgtatggtgatgcctgttcttgatgttgtttggtagatgactggctcgacgtatgcccttctcagtgctgtaggctgcatgttaaagctgcctttctttatcaggttctaa

SEQ ID NO: 24046 - DNA, 122 bp, Homo sapiens
  misc_feature (61)..(62): /note="This region represents a CpG dinucleotide"
  misc_feature (61)..(61): /note="Nucleotide may be methylated to form 5-methylcytosine"
agatatctcattttacagctgggcaaaccccagcatgcacagttcatgtctttgaaaagtcgtgccgttatagaaatgtctgggcagcaggtggcaaaatggtgttgttatcggagccacat

SEQ ID NO: 24047 - DNA, 122 bp, Homo sapiens
  misc_feature (61)..(62): /note="This region represents a CpG dinucleotide"
  misc_feature (61)..(61): /note="Nucleotide may be methylated to form 5-methylcytosine"
acagaaatctgttccagttggcagcagttgggttcactgttatctgcactttaaggcatccgttggggagtattggaaagtagtccctttggatgaggagggtctacagtatttctgacaac

SEQ ID NO: 24048 - DNA, 122 bp, Homo sapiens
  misc_feature (61)..(62): /note="This region represents a CpG dinucleotide"
  misc_feature (61)..(61): /note="Nucleotide may be methylated to form 5-methylcytosine"
tcgccctgcaggtcaaatcaattccctttgtcttgctcactgaggtcacacggatttttgcgtatttagagaatttgcggtgtgaggtcaccctagagggcgggtctgtgacgtcacaaaag

SEQ ID NO: 24049 - DNA, 122 bp, Homo sapiens
  misc_feature (61)..(62): /note="This region represents a CpG dinucleotide"
  misc_feature (61)..(61): /note="Nucleotide may be methylated to form 5-methylcytosine"
cgacctcgcccagccctcctgatcttttaaagtgcattttacttcctggaaagttgggttcgctggttttcaggcggcaagtttgtgccataaggatgaaggcatgctttagagatggcata

SEQ ID NO: 24050 - DNA, 122 bp, Homo sapiens
  misc_feature (61)..(62): /note="This region represents a CpG dinucleotide"
  misc_feature (61)..(61): /note="Nucleotide may be methylated to form 5-methylcytosine"
ccatgcaagattgacgaggtagcatgccacatcatgcagcatctgtaagccacggtgagacgtatgctccctacttcaaaacatgtgcaccatatttgaattgtatatgatttgggatattg

SEQ ID NO: 24051 - DNA, 122 bp, Homo sapiens
  misc_feature (61)..(62): /note="This region represents a CpG dinucleotide"
  misc_feature (61)..(61): /note="Nucleotide may be methylated to form 5-methylcytosine"
ttttcttaacctaggattcctaaggtgtgacacgtatttactatgtgtacagcatttcctcgagccattctgcattaccccctgggactttggaggcaagggggactaatgggaacatataa

SEQ ID NO: 24052 - DNA, 122 bp, Homo sapiens
  misc_feature (61)..(62): /note="This region represents a CpG dinucleotide"
  misc_feature (61)..(61): /note="Nucleotide may be methylated to form 5-methylcytosine"
gtaagatctttgctacacacaatgtgatgctggcagtggcaggggcagtaatctttatttcgtcatttttgaaacatagaagccgtaacggaagcaagtgaaatgctcagtcttagacgact

SEQ ID NO: 24053 - DNA, 122 bp, Homo sapiens
  misc_feature (61)..(62): /note="This region represents a CpG dinucleotide"
  misc_feature (61)..(61): /note="Nucleotide may be methylated to form 5-methylcytosine"
agttctgcagattgtcctccaggggctgcaagctgtgctttcaggaaacactcaagtgtccgctctggacaggatcagctcagggaggaggggcaggtgcccagctcctgcctgccagattt

SEQ ID NO: 24054 - DNA, 122 bp, Homo sapiens
  misc_feature (61)..(62): /note="This region represents a CpG dinucleotide"
  misc_feature (61)..(61): /note="Nucleotide may be methylated to form 5-methylcytosine"
tatgatggatctgtcattttgtcactcagctcaccataaatacatacaactttcatagaccggtcctgccaggcaacagcacttgtattctggagctttctgaattatatatttgctctctt

SEQ ID NO: 24055 - DNA, 122 bp, Homo sapiens
  misc_feature (61)..(62): /note="This region represents a CpG dinucleotide"
  misc_feature (61)..(61): /note="Nucleotide may be methylated to form 5-methylcytosine"
aacagcagagacttaacattggctgtcacagacatgaacattactatttttgtgtttatacgttttttattttgggtagaacacccaaaacagagctcaggaaaagctggtagacaacctgg

SEQ ID NO: 24056 - DNA, 122 bp, Homo sapiens
  misc_feature (61)..(62): /note="This region represents a CpG dinucleotide"
  misc_feature (61)..(61): /note="Nucleotide may be methylated to form 5-methylcytosine"
cccatgtaaacattggcataaatagctgattttatccttgggatggcatagtctatcccacgactgccaaaagaacctggaccctgccatggtaaataaacccctcatcttgcccaagaaga

SEQ ID NO: 24057 - DNA, 122 bp, Homo sapiens
  misc_feature (61)..(62): /note="This region represents a CpG dinucleotide"
  misc_feature (61)..(61): /note="Nucleotide may be methylated to form 5-methylcytosine"
aggtcaaggactgcttctttctcttggacgtagttgtagctcctgtgctgggcatcttaccgtgacatccttggcacgcatttgattcactgattcattgcagtggtgaaactgacatagct

SEQ ID NO: 24058 - DNA, 122 bp, Homo sapiens
  misc_feature (61)..(62): /note="This region represents a CpG dinucleotide"
  misc_feature (61)..(61): /note="Nucleotide may be methylated to form 5-methylcytosine"
aggggcccagtcgtgcttggtgcagtccagtagggttcccacgtacgttttgttcctccacgtgacattgaccactaggacacctgcaggaggcaggggatgaaaaaggatcatagttacca

SEQ ID NO: 24059 - DNA, 122 bp, Homo sapiens
  misc_feature (61)..(62): /note="This region represents a CpG dinucleotide"
  misc_feature (61)..(61): /note="Nucleotide may be methylated to form 5-methylcytosine"
cttaaccatttttaagtgtacaggccaatagcattaagtacattcacactgtcatccaaccgtcaccaccactacccgtctctagaacttctttcatcttgcaaaactgaaactctgcaccc

SEQ ID NO: 24060 - DNA, 122 bp, Homo sapiens
  misc_feature (61)..(62): /note="This region represents a CpG dinucleotide"
  misc_feature (61)..(61): /note="Nucleotide may be methylated to form 5-methylcytosine"
aattaactgtacactatttaatccaccagttccggttcattagaaaaatgcagttctcgccggacatggtggctcacacctgtaatcccagcaattctggaggccaaggtgggcagattgct

SEQ ID NO: 24061 - DNA, 122 bp, Homo sapiens
  misc_feature (61)..(62): /note="This region represents a CpG dinucleotide"
  misc_feature (61)..(61): /note="Nucleotide may be methylated to form 5-methylcytosine"
gaaaagtaaatataaaaacactttcttgaattctagcagtagtgaacaaaggcgtgaatacggaagattttcaaaagtttagcatgaaagatgccatacgtgctgttgccaacacttggaac

SEQ ID NO: 24062 - DNA, 122 bp, Homo sapiens
  misc_feature (61)..(62): /note="This region represents a CpG dinucleotide"
  misc_feature (61)..(61): /note="Nucleotide may be methylated to form 5-methylcytosine"
aaaaccgtggcagtaagagatgcctttctctggcacatcccacctgctgggcataagcggcgccaccctctggagttacagcctcaaggcagtccggtaactaatcaggctttgggatggag

SEQ ID NO: 24063 - DNA, 122 bp, Homo sapiens
  misc_feature (61)..(62): /note="This region represents a CpG dinucleotide"
  misc_feature (61)..(61): /note="Nucleotide may be methylated to form 5-methylcytosine"
acagacagcctcttttgcaaccctcctggttaggggtaatgtgaccgggcactcatttgccgcgtgtagcccctgacttgcacacattttcaactcgttggtctgtggtctgtgttcctgtg

SEQ ID NO: 24064 - DNA, 122 bp, Homo sapiens
  misc_feature (61)..(62): /note="This region represents a CpG dinucleotide"
  misc_feature (61)..(61): /note="Nucleotide may be methylated to form 5-methylcytosine"
aggtttccggcagccatggatcctgtgtgctgaactcagcaagcctttgtgagatgacgacgtggcatcctgctgcagggaggcttgggccgttgcaatctgaccagtgcccagccgtccct

SEQ ID NO: 24065 - DNA, 122 bp, Homo sapiens
  misc_feature (61)..(62): /note="This region represents a CpG dinucleotide"
  misc_feature (61)..(61): /note="Nucleotide may be methylated to form 5-methylcytosine"
cctctttcgtaatccccgtcctctggcaaggtctgggtgtggcacgttggattgggagttcgcgtcgtggatgtctcatacgtttccaggtgtcagtagcatcgcatcacgtacaagtgaaa

SEQ ID NO: 24066 - DNA, 122 bp, Homo sapiens
  misc_feature (61)..(62): /note="This region represents a CpG dinucleotide"
  misc_feature (61)..(61): /note="Nucleotide may be methylated to form 5-methylcytosine"
tagctgctgtggttgatggagttgttgtcctcatagttgaactccacctaaagcccttcccgccatggttggctactttcacatggcccaaaccccaaccctctgatttaatgggtttcctc

SEQ ID NO: 24067 - DNA, 122 bp, Homo sapiens
  misc_feature (61)..(62): /note="This region represents a CpG dinucleotide"
  misc_feature (61)..(61): /note="Nucleotide may be methylated to form 5-methylcytosine"
atgttgtgggggttttccccacatgtcatttgtttttctgaaggtccttcccctggtatccggctaactcatcctgatttcacaggatcagagcacattcctcatctccaaaagggtggcct

SEQ ID NO: 24068 - DNA, 122 bp, Homo sapiens
  misc_feature (61)..(62): /note="This region represents a CpG dinucleotide"
  misc_feature (61)..(61): /note="Nucleotide may be methylated to form 5-methylcytosine"
gcctgctatgacatgcttatgagcagtgggcagcggcgccagtgggagcgcgcccagagtcgtcgggccttccaggtgtgccacccggggtaagggatgggaaactgctccacacatgcacc

SEQ ID NO: 24069 - DNA, 122 bp, Homo sapiens
  misc_feature (61)..(62): /note="This region represents a CpG dinucleotide"
  misc_feature (61)..(61): /note="Nucleotide may be methylated to form 5-methylcytosine"
ccttaacctctcaggctgggatcaatgtcccccaacccccacctcacaccccacaggccacggcagctcagacttccctacatcacaagctccctgtatcagcactgggtctccttctatct

SEQ ID NO: 24070 - DNA, 122 bp, Homo sapiens
  misc_feature (61)..(62): /note="This region represents a CpG dinucleotide"
  misc_feature (61)..(61): /note="Nucleotide may be methylated to form 5-methylcytosine"
ttccatttactgagctagtgactctgctgcagctgctttgggtgttggctcctgaaggcccgcaaatgcctctacttctgaggaaattgccctgtgctaataggggagacacctcacccagg

SEQ ID NO: 24071 - DNA, 122 bp, Homo sapiens
  misc_feature (61)..(62): /note="This region represents a CpG dinucleotide"
  misc_feature (61)..(61): /note="Nucleotide may be methylated to form 5-methylcytosine"
atcacctatatttcccttggaaaataccttcttagggtacagcaggcattagatacccagcgcatgcctgaatgtcaatcctccatgttctcacctgtgagtccacgatccccacccctagg

SEQ ID NO: 24072 - DNA, 122 bp, Homo sapiens
  misc_feature (61)..(62): /note="This region represents a CpG dinucleotide"
  misc_feature (61)..(61): /note="Nucleotide may be methylated to form 5-methylcytosine"
ctccccaatctttagatcgtcctcaatctccatagatttctgcctcttctcccatctatgcgcctcctctgctctccctgttaaattctctcttctctgttataaccccctggacccaatct

SEQ ID NO: 24073 - DNA, 122 bp, Homo sapiens
  misc_feature (61)..(62): /note="This region represents a CpG dinucleotide"
  misc_feature (61)..(61): /note="Nucleotide may be methylated to form 5-methylcytosine"
atgtgaaccaccacgcccagacttaaaatgcttttacttcaaaatatgacctgattttcccgttgtttttttttctctaattctttctagcttttatctctgttaatctctgaatgtttcac

SEQ ID NO: 24074 - DNA, 122 bp, Homo sapiens
  misc_feature (61)..(62): /note="This region represents a CpG dinucleotide"
  misc_feature (61)..(61): /note="Nucleotide may be methylated to form 5-methylcytosine"
aatgacatatgaagatggaggcggagacagtagtgaggcatctcaagccaaggcatgctacgggttgctgacaaccaccagaagctgggagagaggcacggaaaagattctccctcagagcc

SEQ ID NO: 24075 - DNA, 122 bp, Homo sapiens
  misc_feature (61)..(62): /note="This region represents a CpG dinucleotide"
  misc_feature (61)..(61): /note="Nucleotide may be methylated to form 5-methylcytosine"
tagaacaagacacggccttgttggtcaaagtgccagcaccaaggctggctggggcaatggcgccaccatctagtttcgctttgtcgacatggccttgggaagatatcagcacctaggggtct

SEQ ID NO: 24076 - DNA, 122 bp, Homo sapiens
  misc_feature (61)..(62): /note="This region represents a CpG dinucleotide"
  misc_feature (61)..(61): /note="Nucleotide may be methylated to form 5-methylcytosine"
atcttgccacttgcctgcacccatagatcccctgctgttgtgtgacagtgaccactgtgccgtgcttgtctgttaccctatgaccgaggaggaactgagaagacatatcattcctcaacatt

SEQ ID NO: 24077 - DNA, 122 bp, Homo sapiens
  misc_feature (61)..(62): /note="This region represents a CpG dinucleotide"
  misc_feature (61)..(61): /note="Nucleotide may be methylated to form 5-methylcytosine"
gcaagccttgacccgtgacgcatccctacacggttctgctagatggatgacagtaatccacgtccttgacttagctgggacctctgccctggtgaaggcatcacagaaccaaagatgaggaa

SEQ ID NO: 24078 - DNA, 122 bp, Homo sapiens
  misc_feature (61)..(62): /note="This region represents a CpG dinucleotide"
  misc_feature (61)..(61): /note="Nucleotide may be methylated to form 5-methylcytosine"
gggatactgtgacctttgtctagagttgatgggggtgtgatttgtgaaataaaacaggaccgtactgcttggaagaaggaaacggaagctgacataatggggattaattagttgattgctgt

SEQ ID NO: 24079 - DNA, 122 bp, Homo sapiens
  misc_feature (61)..(62): /note="This region represents a CpG dinucleotide"
  misc_feature (61)..(61): /note="Nucleotide may be methylated to form 5-methylcytosine"
tttctcccccctatgttgccagttctctttgtcagcaactctcttgtcctactgggataacgttttaactgtggtacataggttagaagcacactatttgtttacaaggggataaatggttg

SEQ ID NO: 24080 - DNA, 122 bp, Homo sapiens
  misc_feature (61)..(62): /note="This region represents a CpG dinucleotide"
  misc_feature (61)..(61): /note="Nucleotide may be methylated to form 5-methylcytosine"
catttatactgaacttctttttggtttagccaacataaatataccagttctcagccttggcgggagggatacaatgcttcccacaggaaccctgagtcacggggagagtaaatgacttggca

SEQ ID NO: 24081 - DNA, 122 bp, Homo sapiens
  misc_feature (61)..(62): /note="This region represents a CpG dinucleotide"
  misc_feature (61)..(61): /note="Nucleotide may be methylated to form 5-methylcytosine"
ctaagtgtggaagtctgtgtgtggaagaggccagccagggcgacccttcttggcgttgggcgcacctggcacttgaattgggcccacggttttgtcccctttccgggcctgcgagggagtgg

SEQ ID NO: 24082 - DNA, 122 bp, Homo sapiens
  misc_feature (61)..(62): /note="This region represents a CpG dinucleotide"
  misc_feature (61)..(61): /note="Nucleotide may be methylated to form 5-methylcytosine"
ccctgtgcctctggctgggtggcaactttgtgccttcatagtctaaaaacgcaccctcagcgttgcagccccaataggactcagttgatgaacaactttccaggaacgtggctcttgtgtga

SEQ ID NO: 24083 - DNA, 122 bp, Homo sapiens
  misc_feature (61)..(62): /note="This region represents a CpG dinucleotide"
  misc_feature (61)..(61): /note="Nucleotide may be methylated to form 5-methylcytosine"
ggtacacagtgagagggttcttgcatgtctgtttgtgcatgctattctagtgtgactgagcgggtatctctcatgaggtgaattgaaggaagcaacactgtgaccacttgaaggaagcaaca

SEQ ID NO: 24084 - DNA, 122 bp, Homo sapiens
  misc_feature (61)..(62): /note="This region represents a CpG dinucleotide"
  misc_feature (61)..(61): /note="Nucleotide may be methylated to form 5-methylcytosine"
ggactgtccagcctcctcgctaccacttagcccctgtaaaggaggaagtccctttgtcaacggacatgagaatgctgtttggccaatgaccatagtctgccctccagggcccgtgaagatgg

SEQ ID NO: 24085 - DNA, 122 bp, Homo sapiens
  misc_feature (61)..(62): /note="This region represents a CpG dinucleotide"
  misc_feature (61)..(61): /note="Nucleotide may be methylated to form 5-methylcytosine"
aacacttttgggccccgagaggctctcagtcggctgaaggaactttgtcatcagtggctgcggccagaaataaacaccaaggaacagatcctggagcttctggtgctagagcagtttctttc

SEQ ID NO: 24086 - DNA, 122 bp, Homo sapiens
  misc_feature (61)..(62): /note="This region represents a CpG dinucleotide"
  misc_feature (61)..(61): /note="Nucleotide may be methylated to form 5-methylcytosine"
cctggtgtgtggcctgggaggcaaacccagcccaggcctcaagctggattccagaaaacacgccagcacctgggtaatggggtcacatgtgtgtgcagtagccatcctaacaggcttccttc

SEQ ID NO: 24087 - DNA, 122 bp, Homo sapiens
  misc_feature (61)..(62): /note="This region represents a CpG dinucleotide"
  misc_feature (61)..(61): /note="Nucleotide may be methylated to form 5-methylcytosine"
tatcctatacacaggagcatcccacaagtagggttggcagtaaagttggccaggggccaccgatgtgggtggactggatgtggccagtcatggtgcctggggcctcaggctctgttaactgg

SEQ ID NO: 24088 - DNA, 122 bp, Homo sapiens
  misc_feature (61)..(62): /note="This region represents a CpG dinucleotide"
  misc_feature (61)..(61): /note="Nucleotide may be methylated to form 5-methylcytosine"
agctcctccttgtacaaggacctcctgagcacccagcccagcccaggcatggtctccacacggtacagtagtgctgggtcctcagccgtgtgttcatacccctggggacagggtgccatagt

SEQ ID NO: 24089 - DNA, 122 bp, Homo sapiens
  misc_feature (61)..(62): /note="This region represents a CpG dinucleotide"
  misc_feature (61)..(61): /note="Nucleotide may be methylated to form 5-methylcytosine"
aatgcccaggtgtcactaggcaaatcttcagagagtaccaaagagtatgtatcaggaccgcgaacccccacaccctccgcaaatcaatcagctacagctgtcagcacagaggacttccttat

SEQ ID NO: 24090 - DNA, 122 bp, Homo sapiens
  misc_feature (61)..(62): /note="This region represents a CpG dinucleotide"
  misc_feature (61)..(61): /note="Nucleotide may be methylated to form 5-methylcytosine"
gttgacaccaaaaacagcatcacaaatttctggctcattacccttaaagacttgtctttgcggctgtttacagaagctttagagaaggatgaggattagagaattaaaattcataaagggac

SEQ ID NO: 24091 - DNA, 122 bp, Homo sapiens
  misc_feature (61)..(62): /note="This region represents a CpG dinucleotide"
  misc_feature (61)..(61): /note="Nucleotide may be methylated to form 5-methylcytosine"
aaccgcagagctgctccctcaggatgcctgggataacttccatagggcagatgctgctgacgtgctatttccaaagggttcctggcataggactgtgaaaggtttcctggagcctccctaga

SEQ ID NO: 24092 - DNA, 122 bp, Homo sapiens
  misc_feature (61)..(62): /note="This region represents a CpG dinucleotide"
  misc_feature (61)..(61): /note="Nucleotide may be methylated to form 5-methylcytosine"
aggtttcagtgagggtggttggagagcgaggaggatgaaatggagactctctattctggacgtggcaggtttgctatggccattgtaccttccggctgacatgtcagttagcaggtggataa

SEQ ID NO: 24093 - DNA, 122 bp, Homo sapiens
  misc_feature (61)..(62): /note="This region represents a CpG dinucleotide"
  misc_feature (61)..(61): /note="Nucleotide may be methylated to form 5-methylcytosine"
aagtgaatatatgggcacaggtgtgagggaggagaagccttgggcctttgggcagccaggcgacttacaaaagaagacgcagagttgacagttggatttaaagtgtttgtgccagtcaggca

SEQ ID NO: 24094 - DNA, 122 bp, Homo sapiens
  misc_feature (61)..(62): /note="This region represents a CpG dinucleotide"
  misc_feature (61)..(61): /note="Nucleotide may be methylated to form 5-methylcytosine"
ctgaatttcaatgcagcctttccgctcctcccttttcacatcttcattgacttccaaatacgtccaggctgtaaacttcaggtatcaaccatgacattgtgggtctgctcagcccacttcct

SEQ ID NO: 24095 - DNA, 122 bp, Homo sapiens
  misc_feature (61)..(62): /note="This region represents a CpG dinucleotide"
  misc_feature (61)..(61): /note="Nucleotide may be methylated to form 5-methylcytosine"
cctcagcctcctgagtagctactacaggtgtgcgccacagcacctggcttaaattctcttcgtattttaagtgtggtctttattgagctttctttctgtgtccggtgcttgatacatgtggc

SEQ ID NO: 24096 - DNA, 122 bp, Homo sapiens
  misc_feature (61)..(62): /note="This region represents a CpG dinucleotide"
  misc_feature (61)..(61): /note="Nucleotide may be methylated to form 5-methylcytosine"
cactggaattttgtcagtcagcagattccagatgactaagatgatcaaattaagatgtcacgttcaactcatgtcctgcagtgtttcaccatcaacctctgggtttgaaacaagcagggagt

SEQ ID NO: 24097 - DNA, 122 bp, Homo sapiens
  misc_feature (61)..(62): /note="This region represents a CpG dinucleotide"
  misc_feature (61)..(61): /note="Nucleotide may be methylated to form 5-methylcytosine"
ttaagacctaaatcaaggtctaacttttgcttgtccaagtgccagccggaagaacagctccgtgaagccagctaaccaaccaaccaaaaccctgctgctgccccagggccagagaagccata

SEQ ID NO: 24098 - DNA, 122 bp, Homo sapiens
  misc_feature (61)..(62): /note="This region represents a CpG dinucleotide"
  misc_feature (61)..(61): /note="Nucleotide may be methylated to form 5-methylcytosine"
ctttccaaatcccctaagcacacagctggtcaggcctgttaggccaggtgttgctctgcacgtctggccatctttctcgctctctcattccacatagcatggtctggtccaaaggaaaggga

SEQ ID NO: 24099 - DNA, 122 bp, Homo sapiens
  misc_feature (61)..(62): /note="This region represents a CpG dinucleotide"
  misc_feature (61)..(61): /note="Nucleotide may be methylated to form 5-methylcytosine"
aatactgctctaaggcttttcctgtattactcatcagttagttagcagaggatgtccccacgcccgagcacacactgtgcatccatcaggctagctccatgaggaaggtaagaggatgtcag

SEQ ID NO: 24100 - DNA, 122 bp, Homo sapiens
  misc_feature (61)..(62): /note="This region represents a CpG dinucleotide"
  misc_feature (61)..(61): /note="Nucleotide may be methylated to form 5-methylcytosine"
aacttcccatttagagcacttatcacggcttgaaatattagagcgattatttgggttgggcgcggattatttgacagtaatcagggtttacaagtctgtttcgtttcttgactgacatacaa

SEQ ID NO: 24101 - DNA, 122 bp, Homo sapiens
  misc_feature (61)..(62): /note="This region represents a CpG dinucleotide"
  misc_feature (61)..(61): /note="Nucleotide may be methylated to form 5-methylcytosine"
aaaattcacagtaatcctggagaaaatgaagaatgtgtgaatcaatgtattgtgtgcaaacggtgatatgagggtagcctgagtcatatgaactccctgggaaaaacgaccagctttgtgta

SEQ ID NO: 24102 - DNA, 122 bp, Homo sapiens
  misc_feature (61)..(62): /note="This region represents a CpG dinucleotide"
  misc_feature (61)..(61): /note="Nucleotide may be methylated to form 5-methylcytosine"
atctgaattcctcttctctggttgttctgggcaacccaggctgctgtgaacagccagaagcgatggatgctgattcctgcaagtgagcacctgcctcacaggacagggctccaagtgggtgg

SEQ ID NO: 24103 - DNA, 122 bp, Homo sapiens
  misc_feature (61)..(62): /note="This region represents a CpG dinucleotide"
  misc_feature (61)..(61): /note="Nucleotide may be methylated to form 5-methylcytosine"
gacagagcaaggctctgtctccaaaaaagaaaaagactcaaccctaagtcagctccaggacgtatgtgcctactctacatgtgtgagtccgaggggaaaaaacatcatatgacctcttctag

SEQ ID NO: 24104 - DNA, 122 bp, Homo sapiens
  misc_feature (61)..(62): /note="This region represents a CpG dinucleotide"
  misc_feature (61)..(61): /note="Nucleotide may be methylated to form 5-methylcytosine"
aaatacaagtggccaataaacctatgaaaattatgcctggggccaggtgtggttggcttacgcctataatcccagcagtttggcaggccgaggtgggcagatcgtctgaggtcaggaattca

SEQ ID NO: 24105 - DNA, 122 bp, Homo sapiens
  misc_feature (61)..(62): /note="This region represents a CpG dinucleotide"
  misc_feature (61)..(61): /note="Nucleotide may be methylated to form 5-methylcytosine"
taattaatttttaagtgaaaattaagacaacactatcagagcattttacacccccagattcgaggaattgaaaagtctgacaacacccagtgctatcaaggatataaaataacagaaactgc

SEQ ID NO: 24106 - DNA, 122 bp, Homo sapiens
  misc_feature (61)..(62): /note="This region represents a CpG dinucleotide"
  misc_feature (61)..(61): /note="Nucleotide may be methylated to form 5-methylcytosine"
ggtcttgtgggacacagacagacctgatgacttttcagatagaattgcagactgagtaggcggaggaatggagtagatatattattagagtttgtcatccagggcctggcaggataatcagt

SEQ ID NO: 24107 - DNA, 122 bp, Homo sapiens
  misc_feature (61)..(62): /note="This region represents a CpG dinucleotide"
  misc_feature (61)..(61): /note="Nucleotide may be methylated to form 5-methylcytosine"
gccaatttccacaatatgtttcctgttttatacatacatatatctgcatctacattcagtcgtacacccatagcaatgttttggtcagtgaaagactgcacatattgatggtggtctcaaag

SEQ ID NO: 24108 - DNA, 122 bp, Homo sapiens
  misc_feature (61)..(62): /note="This region represents a CpG dinucleotide"
  misc_feature (61)..(61): /note="Nucleotide may be methylated to form 5-methylcytosine"
acacccatttcacaaaggaaaattgccagctgccagcaagtcaaatctcctttgtgggaacggatcagctccccacagtggattctggcctctgatctgaccccaggatgtttgccagatat

SEQ ID NO: 24109 - DNA, 122 bp, Homo sapiens
  misc_feature (61)..(62): /note="This region represents a CpG dinucleotide"
  misc_feature (61)..(61): /note="Nucleotide may be methylated to form 5-methylcytosine"
tattgtgacacgtgggttataatgagttagggcctacttaagaagaaagtggaaagaaagcgggtaaaattgttgctcagatactagcatgtgggtggagatatagatatagatataggtat

SEQ ID NO: 24110 - DNA, 122 bp, Homo sapiens
  misc_feature (61)..(62): /note="This region represents a CpG dinucleotide"
  misc_feature (61)..(61): /note="Nucleotide may be methylated to form 5-methylcytosine"
aagaaaggaccggtgatgaacctcagctgtttgtgaatgcatgtggcttgtggagaggagcggaagtgagtttcaggtatttcagtccatcatgactgtgaaattgaactgtaaatgctacc

SEQ ID NO: 24111 - DNA, 122 bp, Homo sapiens
  misc_feature (61)..(62): /note="This region represents a CpG dinucleotide"
  misc_feature (61)..(61): /note="Nucleotide may be methylated to form 5-methylcytosine"
aggaaatgagagtcagttaaaagtaaacaagaagaggctgctggatggccacaattgctgcggccacatgtgtggggaaaagttccttgaggaagatgagttagtctaggtcttttttttcc

SEQ ID NO: 24112 - DNA, 122 bp, Homo sapiens
  misc_feature (61)..(62): /note="This region represents a CpG dinucleotide"
  misc_feature (61)..(61): /note="Nucleotide may be methylated to form 5-methylcytosine"
agcaaattcatagctatgcacctaccattccactgtccttgagatttgcacttgctgctccgcaagatggactgactttctctgacccagaaagttaatagacaaatttgacattatcttat

SEQ ID NO: 24113 - DNA, 122 bp, Homo sapiens
  misc_feature (61)..(62): /note="This region represents a CpG dinucleotide"
  misc_feature (61)..(61): /note="Nucleotide may be methylated to form 5-methylcytosine"
aaaaggacctcctagcattccaagtaaacagaaacatccagatttcagtaaagattaagacgagactttctgataagatttgatacgtcgagatcacctttgtggccagataacaataaaac

SEQ ID NO: 24114 - DNA, 122 bp, Homo sapiens
  misc_feature (61)..(62): /note="This region represents a CpG dinucleotide"
  misc_feature (61)..(61): /note="Nucleotide may be methylated to form 5-methylcytosine"
catcacaactggtctcacaaaaaacatggggtgtctggcgacagctaaatcacagactggcgtctcctaagcagtctgtctaccattagggtctgggaaatggtatttactatacaattaga

SEQ ID NO: 24115 - DNA, 122 bp, Homo sapiens
  misc_feature (61)..(62): /note="This region represents a CpG dinucleotide"
  misc_feature (61)..(61): /note="Nucleotide may be methylated to form 5-methylcytosine"
gcagactctgccaggctgcagtcccctgtcaccagccatatgaaacacctgtaggactcacgccactgacaaagcacagagccacctgcctagcccctgagatggccaagaatataaacggc

SEQ ID NO: 24116 - DNA, 122 bp, Homo sapiens
  misc_feature (61)..(62): /note="This region represents a CpG dinucleotide"
  misc_feature (61)..(61): /note="Nucleotide may be methylated to form 5-methylcytosine"
ttcctgtctttaagtgcaccagtgctacttttcagctggctgcatttcctcttaagctttcgaggtgtaaatacattggatttgaatgtgtgtctgtttgcattgggcagaggtggattgct

SEQ ID NO: 24117 - DNA, 122 bp, Homo sapiens
  misc_feature (61)..(62): /note="This region represents a CpG dinucleotide"
  misc_feature (61)..(61): /note="Nucleotide may be methylated to form 5-methylcytosine"
ttgccaactgcagcagagatcttccactccagatagggttcccatttgtgtcatctgtggcgtgtcgcaccaccctaattcaaatattatgacaaggtagcaaccagacgcgttgaaggact

SEQ ID NO: 24118 - DNA, 122 bp, Homo sapiens
  misc_feature (61)..(62): /note="This region represents a CpG dinucleotide"
  misc_feature (61)..(61): /note="Nucleotide may be methylated to form 5-methylcytosine"
tagcttcttgtacactctcctgctgcctgcccgacactaccgagcggagagagaaaggaacgtggctcatgagttcattgaaatgaaatctctaggccgggtgtggtggctcatgcctgtac

SEQ ID NO: 24119 - DNA, 122 bp, Homo sapiens
  misc_feature (61)..(62): /note="This region represents a CpG dinucleotide"
  misc_feature (61)..(61): /note="Nucleotide may be methylated to form 5-methylcytosine"
gtttaaaccatctgaggaacagtttttaagcagccaagtcacattcatgctgtatattcccgtagctgttaccaataataaatgcttatttaggttaatatttcaatattcagtatttacac

SEQ ID NO: 24120 - DNA, 122 bp, Homo sapiens
  misc_feature (61)..(62): /note="This region represents a CpG dinucleotide"
  misc_feature (61)..(61): /note="Nucleotide may be methylated to form 5-methylcytosine"
taacgtaattaaaacacctggcacacgatgggcactaacataatatttccttttctccaccgtctttaccccttttccttcagctcccctaaaccttttcaggtccagcttttttgagtggc

SEQ ID NO: 24121 - DNA, 122 bp, Homo sapiens
  misc_feature (61)..(62): /note="This region represents a CpG dinucleotide"
  misc_feature (61)..(61): /note="Nucleotide may be methylated to form 5-methylcytosine"
gtccattattttattttcccttatagcctgtgtaagtgtagtgccccttgtcattatgctcggcaaagcacaaaccttagcccacttggacttccttcctctccttctcctccccacctgca

SEQ ID NO: 24122 - DNA, 122 bp, Homo sapiens
  misc_feature (61)..(62): /note="This region represents a CpG dinucleotide"
  misc_feature (61)..(61): /note="Nucleotide may be methylated to form 5-methylcytosine"
agtgcccggccagcgctacctcccacctgcacagcccacaaggagcccccggtgcatgagcgccaccatgtcgctgcggaagccctgcagcagcctctgagccatttcctgctgcacctttg

SEQ ID NO: 24123 - DNA, 122 bp, Homo sapiens
  misc_feature (61)..(62): /note="This region represents a CpG dinucleotide"
  misc_feature (61)..(61): /note="Nucleotide may be methylated to form 5-methylcytosine"
agttgctttgagtggtgttgttctcccttgcaacctttgacctattatgaagataaataacggatgctggcaaggtggtggagaaaagggaacacttacacgcttccagttagaacactctt

SEQ ID NO: 24124 - DNA, 122 bp, Homo sapiens
  misc_feature (61)..(62): /note="This region represents a CpG dinucleotide"
  misc_feature (61)..(61): /note="Nucleotide may be methylated to form 5-methylcytosine"
ctgggttaagtgctcatgagtcacagagaacctgccttagatctcagtttcagtgactttcgtcagagagataattggagggattctctaaccggttgtcaagggctctctttcttgattgg

SEQ ID NO: 24125 - DNA, 122 bp, Homo sapiens
  misc_feature (61)..(62): /note="This region represents a CpG dinucleotide"
  misc_feature (61)..(61): /note="Nucleotide may be methylated to form 5-methylcytosine"
aacataataatccatctatacaaacctgcaagagcacagaagacagatacccaagagtttcgctgagcattgtgtgtaatgacaaaaacagctacaaactacttagctgttcatcaagagag

SEQ ID NO: 24126 - DNA, 122 bp, Homo sapiens
  misc_feature (61)..(62): /note="This region represents a CpG dinucleotide"
  misc_feature (61)..(61): /note="Nucleotide may be methylated to form 5-methylcytosine"
agtttatttgagcattcagctatttgtggatggggcagtaccagaccacaggtggtttagcgctccaccaagaaggtaagggaaactttttgaaggtgttcatagaagtaaggcaaattaaa

SEQ ID NO: 24127 - DNA, 122 bp, Homo sapiens
  misc_feature (61)..(62): /note="This region represents a CpG dinucleotide"
  misc_feature (61)..(61): /note="Nucleotide may be methylated to form 5-methylcytosine"
acctgtgcaacacctgtgctcttctagggccatcccttcctactttgtgagttcttgttccgtcagttatgcctcatttgttcacattctcagcctctcctttcctcttcctcattatcatt

SEQ ID NO: 24128 - DNA, 122 bp, Homo sapiens
  misc_feature (61)..(62): /note="This region represents a CpG dinucleotide"
  misc_feature (61)..(61): /note="Nucleotide may be methylated to form 5-methylcytosine"
ccggtggataagtaaccaaccaagatatcattattactagccttcttaaagtgcccattacgtacccagaacagatgaaaaaggtccttccttcagaaagttaatattggaaggaacaggca

SEQ ID NO: 24129 - DNA, 122 bp, Homo sapiens
  misc_feature (61)..(62): /note="This region represents a CpG dinucleotide"
  misc_feature (61)..(61): /note="Nucleotide may be methylated to form 5-methylcytosine"
ccgtcgataagctcacttaattctgacagcaactctagtgtaccaatgaccagtgctgggcgctgtgaatcagcaggactggcagctcaccctgattagctggtgatttcctgtgttcttgg

SEQ ID NO: 24130 - DNA, 122 bp, Homo sapiens
  misc_feature (61)..(62): /note="This region represents a CpG dinucleotide"
  misc_feature (61)..(61): /note="Nucleotide may be methylated to form 5-methylcytosine"
caccacgtaagtgaaggatttgtgtatgatgagctctaggctcccctgagatctaactaacgttctaggatagggacatgggctctggactcagaccatgagagtttacatccctgtttcat

SEQ ID NO: 24131 - DNA, 122 bp, Homo sapiens
  misc_feature (61)..(62): /note="This region represents a CpG dinucleotide"
  misc_feature (61)..(61): /note="Nucleotide may be methylated to form 5-methylcytosine"
gtgatccacctgcctcagtctcccaaaatgctgggattacaggctgtgagctaccacacccggccaaccaagttgacttctgattaaccagcttttagggaaggcctctaagatttccagtt

SEQ ID NO: 24132 - DNA, 122 bp, Homo sapiens
  misc_feature (61)..(62): /note="This region represents a CpG dinucleotide"
  misc_feature (61)..(61): /note="Nucleotide may be methylated to form 5-methylcytosine"
ttggacactctcaggatgcagaggagaaaaagataaaagtgggtaaatacgaaaggtagacgtggaggacagataatggatccttcacccaagaggagttcctgaacaggaaactgaagtca

SEQ ID NO: 24133 - DNA, 122 bp, Homo sapiens
  misc_feature (61)..(62): /note="This region represents a CpG dinucleotide"
  misc_feature (61)..(61): /note="Nucleotide may be methylated to form 5-methylcytosine"
caggtgcagctgtgcgccctcaggcttagaggcttagaattctctgcagcacctaaaggccgtgagcttggattcaaaccagagccccttctggtcctggagtctgggacgaccgcagcccc

SEQ ID NO: 24134 - DNA, 122 bp, Homo sapiens
  misc_feature (61)..(62): /note="This region represents a CpG dinucleotide"
  misc_feature (61)..(61): /note="Nucleotide may be methylated to form 5-methylcytosine"
cctatgcacaaattcatttggcgggggggttgtcagccctcttgcattatcttaaaaatacgctcttcttgacctgtggaccaggaaacagagactttcaagacaaggagcaatttcaggtc

SEQ ID NO: 24135 - DNA, 122 bp, Homo sapiens
  misc_feature (61)..(62): /note="This region represents a CpG dinucleotide"
  misc_feature (61)..(61): /note="Nucleotide may be methylated to form 5-methylcytosine"
agcttaccttcccaaacagattccccagatggccacacccttctgtagcactcattctgacgcatctgcctgatttatgctggagggcatttgtttcaaacaaatgtgtgttgagctacaaa

SEQ ID NO: 24136 - DNA, 122 bp, Homo sapiens
  misc_feature (61)..(62): /note="This region represents a CpG dinucleotide"
  misc_feature (61)..(61): /note="Nucleotide may be methylated to form 5-methylcytosine"
cgcagggcccatgctaatcttctctgtatcgttccaatgttaatacatgtgctgtcgaagcgagcactgccctgctatttagggacagacttttcctgttctcttcacacttctcaaaaaga

SEQ ID NO: 24137 - DNA, 122 bp, Homo sapiens
  misc_feature (61)..(62): /note="This region represents a CpG dinucleotide"
  misc_feature (61)..(61): /note="Nucleotide may be methylated to form 5-methylcytosine"
ctaattagtcaccaagtccttagaatttatcctgctctactgcatgtttcttcctcaaaccgtccttcacctctgtactgcagcccctttagaaattagcttgagaggccagatgtggtggc

SEQ ID NO: 24138 - DNA, 122 bp, Homo sapiens
  misc_feature (61)..(62): /note="This region represents a CpG dinucleotide"
  misc_feature (61)..(61): /note="Nucleotide may be methylated to form 5-methylcytosine"
gccttcaggaaggaaataggtgtgattcacaatctccatttcataggagaggaagtaagacgcagagagttgaaaatgcttgtccaaaacaatccagtgagttagtgaaaaagtcatttctg

SEQ ID NO: 24139 - DNA, 122 bp, Homo sapiens
  misc_feature (61)..(62): /note="This region represents a CpG dinucleotide"
  misc_feature (61)..(61): /note="Nucleotide may be methylated to form 5-methylcytosine"
ggaggcttgacaagtaatccccaaggcctcagtctcctctcttctccaatagggagtgtgcgtgcatgtctccaggagaggtagtgctttccacacagcttctcgtctgtgctgtctcaaaa

SEQ ID NO: 24140 - DNA, 122 bp, Homo sapiens
  misc_feature (61)..(62): /note="This region represents a CpG dinucleotide"
  misc_feature (61)..(61): /note="Nucleotide may be methylated to form 5-methylcytosine"
atgtattgagacgtgattaaaatatccccaaatgaagggactgaaatgaaaataaccaaacgagataaatgtgtgtggaactgccttgttaacaataaggattatatctgtatatgtcatat

SEQ ID NO: 24141 - DNA, 122 bp, Homo sapiens
  misc_feature (61)..(62): /note="This region represents a CpG dinucleotide"
  misc_feature (61)..(61): /note="Nucleotide may be methylated to form 5-methylcytosine"
gtggctgccttcttgcatctgccgttgcctcccttgtgagtaattacctatgagggaatacgcatgtttgtgtgtatgagacagagagagaatgcgcgttgggacagttggaacaatctctt

SEQ ID NO: 24142 - DNA, 122 bp, Homo sapiens
  misc_feature (61)..(62): /note="This region represents a CpG dinucleotide"
  misc_feature (61)..(61): /note="Nucleotide may be methylated to form 5-methylcytosine"
taaataaaaaccacttgccaggaccctaggggggcttatttgccatctagtcctagtactcgagatcatttaaaattctctctctcctgcttctcactcacttactcattcaaacaaacaaa

SEQ ID NO: 24143 - DNA, 122 bp, Homo sapiens
  misc_feature (61)..(62): /note="This region represents a CpG dinucleotide"
  misc_feature (61)..(61): /note="Nucleotide may be methylated to form 5-methylcytosine"
gacctcaactgatccgcccgccttggcctcccaaagtgctgggattgcaggcgtggccaccgtgcctgacccatcttagccactcccaagtgcacacagttctatggcattaggcacattca

SEQ ID NO: 24144 - DNA, 122 bp, Homo sapiens
  misc_feature (61)..(62): /note="This region represents a CpG dinucleotide"
  misc_feature (61)..(61): /note="Nucleotide may be methylated to form 5-methylcytosine"
ccttggcttatgagtcagctgaaagcgacatcatgaagaggcttccaaggaacccaaagacggataatctggtgaaccaccgtctcattggcatggcctatggacagattggtgcgcccaga

SEQ ID NO: 24145 - DNA, 122 bp, Homo sapiens
  misc_feature (61)..(62): /note="This region represents a CpG dinucleotide"
  misc_feature (61)..(61): /note="Nucleotide may be methylated to form 5-methylcytosine"
caagtgtagatctctgcagactttgtttcctgctgttaatatgcattattcaaaaagcaacgattggattgatgtggttccgttgtacaggaagtggcatttatgtataatccatgtactgc

SEQ ID NO: 24146 - DNA, 122 bp, Homo sapiens
  misc_feature (61)..(62): /note="This region represents a CpG dinucleotide"
  misc_feature (61)..(61): /note="Nucleotide may be methylated to form 5-methylcytosine"
caagatattatgaccaagttctgtactccgtttttactgaaatgacttctacttcatcaacgtacggtctgttcctgaagaaacttcctctttctgggtcaaattctgactgagaatgtaaa

SEQ ID NO: 24147 - DNA, 122 bp, Homo sapiens
  misc_feature (61)..(62): /note="This region represents a CpG dinucleotide"
  misc_feature (61)..(61): /note="Nucleotide may be methylated to form 5-methylcytosine"
tatgatttttctaagtttcagtggctgcacacccttatcccacataagattagattttcacgcagacattgggcaagagtcccaggcctcacagatattcttgggtcaaccaggaactctcc

SEQ ID NO: 24148 - DNA, 122 bp, Homo sapiens
  misc_feature (61)..(62): /note="This region represents a CpG dinucleotide"
  misc_feature (61)..(61): /note="Nucleotide may be methylated to form 5-methylcytosine"
tgagtgagcagataaaggagcttgaattagtctatagaacaatagggtagctctctggaccggtcagtgactcagaatattgatgaaagttgtgtaactgagcagagaaaagaggtatgcct

SEQ ID NO: 24149 - DNA, 122 bp, Homo sapiens
  misc_feature (61)..(62): /note="This region represents a CpG dinucleotide"
  misc_feature (61)..(61): /note="Nucleotide may be methylated to form 5-methylcytosine"
gtcaggggctctcattccttgtaccctgctgctgaggacactgcctggtacatgggttagcgccttctgggcaccaagtggaataaaatctttagaaagaggaaatggcacctgcctcaagg

SEQ ID NO: 24150 - DNA, 122 bp, Homo sapiens
  misc_feature (61)..(62): /note="This region represents a CpG dinucleotide"
  misc_feature (61)..(61): /note="Nucleotide may be methylated to form 5-methylcytosine"
ccattttgccatttttacgaagcacaaacaaaaaatctcaaaccctgctcatttaaatgacggctctgagaacagtcaatggcccagagggaacagagaattcacgttcctgcgaccgcacc

SEQ ID NO: 24151 - DNA, 122 bp, Homo sapiens
  misc_feature (61)..(62): /note="This region represents a CpG dinucleotide"
  misc_feature (61)..(61): /note="Nucleotide may be methylated to form 5-methylcytosine"
tcgtgaaactccaagttagttttactaactatatcaagcttcatgtaaccttcaacttcccgtttcatcaggcacaaaccttcattattgttcaccattgtaattaggtagcattttaagac

SEQ ID NO: 24152 - DNA, 122 bp, Homo sapiens
  misc_feature (61)..(62): /note="This region represents a CpG dinucleotide"
  misc_feature (61)..(61): /note="Nucleotide may be methylated to form 5-methylcytosine"
cccatagtacgacctcatactcaatcacaaagcaaacctttggcccggcacagtggctcacgcttgtaatcccagcatattgggaggccaaggctggtggatcacctgaggttaggtgttca

SEQ ID NO: 24153 - DNA, 122 bp, Homo sapiens
  misc_feature (61)..(62): /note="This region represents a CpG dinucleotide"
  misc_feature (61)..(61): /note="Nucleotide may be methylated to form 5-methylcytosine"
caacacaaggagaccttgtctctatattgcctaggctggtcttgaactcttggccttaaacgatccttttgtttaaaaaataagaacattagctgggcattgtggtgtgtgcttatagtcct

SEQ ID NO: 24154 - DNA, 122 bp, Homo sapiens
  misc_feature (61)..(62): /note="This region represents a CpG dinucleotide"
  misc_feature (61)..(61): /note="Nucleotide may be methylated to form 5-methylcytosine"
agacacattcatgggggctgcccttatagaaacctaacaaacaataggctggcatcctgacgagctgccacagtgctcccaggacaggaaccacctttgcagagagactgactcattcatta

SEQ ID NO: 24155 - DNA, 122 bp, Homo sapiens
  misc_feature (61)..(62): /note="This region represents a CpG dinucleotide"
  misc_feature (61)..(61): /note="Nucleotide may be methylated to form 5-methylcytosine"
aggaattgatataccaggcgtcatggtggtcagcagacaaataggaaactcctgttatgtcgtcagaatgagttgcagagagtaccatctgctacctgtattgtacatctttctgttcctct

SEQ ID NO: 24156 - DNA, 122 bp, Homo sapiens
  misc_feature (61)..(62): /note="This region represents a CpG dinucleotide"
  misc_feature (61)..(61): /note="Nucleotide may be methylated to form 5-methylcytosine"
acttcactgttggagacctttcttctgagtgctgccctggggtgctgttcaaaatccaggcgtctcatgaattatgctgccagatctaggaggagccagtcctctttggaactaggtgaact

SEQ ID NO: 24157 - DNA, 122 bp, Homo sapiens
  misc_feature (61)..(62): /note="This region represents a CpG dinucleotide"
  misc_feature (61)..(61): /note="Nucleotide may be methylated to form 5-methylcytosine"
tttagatatgttcagattcacaaataccattgtgttacagtcgcctgcagtgttcagtaccgtctcatgctgtacgggtatgaggcctaggagcaacaggctgtacagcatgacttaggtgt

SEQ ID NO: 24158 - DNA, 122 bp, Homo sapiens
  misc_feature (61)..(62): /note="This region represents a CpG dinucleotide"
  misc_feature (61)..(61): /note="Nucleotide may be methylated to form 5-methylcytosine"
tcatgtgttatcaaaagcaacttgtgtttcctttaaagccaactgccccagtgaagtgcccgttggttaagaaaagtcaacaaaccataaagtgaaataaggaactgacaggacttcaaaga

SEQ ID NO: 24159 - DNA, 122 bp, Homo sapiens
  misc_feature (61)..(62): /note="This region represents a CpG dinucleotide"
  misc_feature (61)..(61): /note="Nucleotide may be methylated to form 5-methylcytosine"
gcaggtgatggggctcccctccgtcctcgtgggacgggtcctgccttgggccccaaaagccgaccgcggttcattagcgctgcttctgggatcatcccgcagccctttccgcgctcctttgc

SEQ ID NO: 24160 - DNA, 122 bp, Homo sapiens
  misc_feature (61)..(62): /note="This region represents a CpG dinucleotide"
  misc_feature (61)..(61): /note="Nucleotide may be methylated to form 5-methylcytosine"
cacgaacggtttctttagtgattatgttgactccaccttcctagtttcaaaccctgcacccgcactctccagacaggaagtccctctccctcgaccagggattgagggagaagagattcaga

SEQ ID NO: 24161 - DNA, 122 bp, Homo sapiens
  misc_feature (61)..(62): /note="This region represents a CpG dinucleotide"
  misc_feature (61)..(61): /note="Nucleotide may be methylated to form 5-methylcytosine"
gagctggcctttcctgaatttctccatcttatcctgcttaatctcatcagaggacctttgcgtgcaaagctacctctaaaatattctctgtctagtcaaacctattcccagctcaagtgaca

SEQ ID NO: 24162 - DNA, 122 bp, Homo sapiens
  misc_feature (61)..(62): /note="This region represents a CpG dinucleotide"
  misc_feature (61)..(61): /note="Nucleotide may be methylated to form 5-methylcytosine"
ggccctcacctggggaggtggtgaccgcaagcctgacagccccaaagccttcagagatgccgcctggggacactttgggaaagtccaggcggaggacacctgggaatgtgatagtgacacaa

SEQ ID NO: 24163 - DNA, 122 bp, Homo sapiens
  misc_feature (61)..(62): /note="This region represents a CpG dinucleotide"
  misc_feature (61)..(61): /note="Nucleotide may be methylated to form 5-methylcytosine"
aacactggcagcacctattgaggccatgtttcaggatcagaccatgctggtttgagcagacgcagcaagagtgagaaccccggccgaattttcatgggtggctctagtagagctgctggtga

SEQ ID NO: 24164 - DNA, 122 bp, Homo sapiens
  misc_feature (61)..(62): /note="This region represents a CpG dinucleotide"
  misc_feature (61)..(61): /note="Nucleotide may be methylated to form 5-methylcytosine"
ggttgtgcttgttgggggacttggagaggcagagcacgttcgactcttcactgaccgtctcgcggtacgagacgaccgggtcagatttctgcaaaaagaggttaagtcccactcttgcctgg

SEQ ID NO: 24165 - DNA, 122 bp, Homo sapiens
  misc_feature (61)..(62): /note="This region represents a CpG dinucleotide"
  misc_feature (61)..(61): /note="Nucleotide may be methylated to form 5-methylcytosine"
gtattgtttccattaaacaaaaatgccacttccttcccactctgctaagaaaactgggtacgtgttatgagaaaacacagagggggatgagcttccacaatgaagtaaatgatttcttttat

SEQ ID NO: 24166 - DNA, 122 bp, Homo sapiens
  misc_feature (61)..(62): /note="This region represents a CpG dinucleotide"
  misc_feature (61)..(61): /note="Nucleotide may be methylated to form 5-methylcytosine"
gtgttgctttcatttttgtctgggggtggagggaatcattcctggcccatctttttagagcgcgttgccagaaaaaagtaagatttcaatgaagggtagctctttcctgagagagtgggatg

SEQ ID NO: 24167 - DNA, 122 bp, Homo sapiens
  misc_feature (61)..(62): /note="This region represents a CpG dinucleotide"
  misc_feature (61)..(61): /note="Nucleotide may be methylated to form 5-methylcytosine"
ggtcatgtgactgtattcagtttgtggtttgactgccgctggcatccgaggtggcctaaccgttgtagctaaggacttggtagggacaccggaaggctgagacctctctctccttgtggtcc

SEQ ID NO: 24168 - DNA, 122 bp, Homo sapiens
  misc_feature (61)..(62): /note="This region represents a CpG dinucleotide"
  misc_feature (61)..(61): /note="Nucleotide may be methylated to form 5-methylcytosine"
tgctgacatgaagagagctatgatatgccactgctgccaactcatcctctgcccccacctcgaaacccacagtccccagtggagggccactactcatccccattggtttcccaggggagggg

SEQ ID NO: 24169 - DNA, 122 bp, Homo sapiens
  misc_feature (61)..(62): /note="This region represents a CpG dinucleotide"
  misc_feature (61)..(61): /note="Nucleotide may be methylated to form 5-methylcytosine"
tcctgcttccagcttttccttacaggtgtggttcccaaatgcagttcccaataaatatcccgcatgcaaaactctcctgcagagtctgtttgcaggaaatccaacctaaggcatcattctga

SEQ ID NO: 24170 - DNA, 122 bp, Homo sapiens
  misc_feature (61)..(62): /note="This region represents a CpG dinucleotide"
  misc_feature (61)..(61): /note="Nucleotide may be methylated to form 5-methylcytosine"
gagcttaatattctccttgcaacatcacagtcacagtgctggttgagtagttacttgcctcgaaggactggtaagcctttgacaaggattggttacttgggaagttttcttgcttacctgta

SEQ ID NO: 24171 - DNA, 122 bp, Homo sapiens
  misc_feature (61)..(62): /note="This region represents a CpG dinucleotide"
  misc_feature (61)..(61): /note="Nucleotide may be methylated to form 5-methylcytosine"
gcaatagccttttagctggcctctctgcttccattcttgactgctacagaccattcttcacgtagtcatccagtgagtattttaaaacataagttatgtggctcttctgctttcttccgtcc

SEQ ID NO: 24172 - DNA, 122 bp, Homo sapiens
  misc_feature (61)..(62): /note="This region represents a CpG dinucleotide"
  misc_feature (61)..(61): /note="Nucleotide may be methylated to form 5-methylcytosine"
cttcattgcccagtgttttcaaagtccccacgtgtgttggttattctttagtaaagtagacgtgacaatgctcgttggctgttattgtgaagcttgacttataatactgggattttgagatc

SEQ ID NO: 24173 - DNA, 122 bp, Homo sapiens
  misc_feature (61)..(62): /note="This region represents a CpG dinucleotide"
  misc_feature (61)..(61): /note="Nucleotide may be methylated to form 5-methylcytosine"
tcccctactgcgcatgccaacacagcgtcggccctcctgataccctcagctcttcacaaacgtggcgttcatacagcttgctcagcttgtcccagaaggtccatttggttcccaaagcacac

SEQ ID NO: 24174 - DNA, 122 bp, Homo sapiens
  misc_feature (61)..(62): /note="This region represents a CpG dinucleotide"
  misc_feature (61)..(61): /note="Nucleotide may be methylated to form 5-methylcytosine"
gagtatgggccagggctgctgacttgcatgagttcaaatgaatattactaaaccagaacacgttccatgactacatgacatcattttgtattgtttcctctttcctggctgcttccctttta

SEQ ID NO: 24175 - DNA, 122 bp, Homo sapiens
  misc_feature (61)..(62): /note="This region represents a CpG dinucleotide"
  misc_feature (61)..(61): /note="Nucleotide may be methylated to form 5-methylcytosine"
aaagaggctgcaggatttctcaggaggaggggtaggatcagacgggtggagaaaccaaagcgaaccacacacaaaaaacagcaggaaaagctactgcaaagatgaggccaaaccctgtgccc

SEQ ID NO: 24176 - DNA, 122 bp, Homo sapiens
  misc_feature (61)..(62): /note="This region represents a CpG dinucleotide"
  misc_feature (61)..(61): /note="Nucleotide may be methylated to form 5-methylcytosine"
gttgtgagttaggctgtcagaacagtgcgggctagaggcgcacacgtttcatctaggcttcgggcggggcgcagcaggtgggtgaggctgcggtggtggctgctgcccagggtgggaggctc

SEQ ID NO: 24177 - DNA, 122 bp, Homo sapiens
  misc_feature (61)..(62): /note="This region represents a CpG dinucleotide"
  misc_feature (61)..(61): /note="Nucleotide may be methylated to form 5-methylcytosine"
ccaactcctgacctcagatgatccacctgcctctgcctcccaaagtgctgggattacaggcgtgagcccagcctgagtatgttttctggtgtgattacagtaaggcctacatgtaatccacg

SEQ ID NO: 24178 - DNA, 122 bp, Homo sapiens
  misc_feature (61)..(62): /note="This region represents a CpG dinucleotide"
  misc_feature (61)..(61): /note="Nucleotide may be methylated to form 5-methylcytosine"
tgctctcagacaccatgctccagcaccctagtcgggcagcggggtaggtgtagagggactcggagaatgagcagctacctgggctgcgaatcctgcctgttcacccaggcaagttccttcat

SEQ ID NO: 24179 - DNA, 122 bp, Homo sapiens
  misc_feature (61)..(62): /note="This region represents a CpG dinucleotide"
  misc_feature (61)..(61): /note="Nucleotide may be methylated to form 5-methylcytosine"
aaggatacataactaccattgattgagagctcaccataaaaagccaggctttgtacaaagcgtttacgtgcattatctcattcaatcctcaaagacatcatggaggaaggaattactaacca

SEQ ID NO: 24180 - DNA, 122 bp, Homo sapiens
  misc_feature (61)..(62): /note="This region represents a CpG dinucleotide"
  misc_feature (61)..(61): /note="Nucleotide may be methylated to form 5-methylcytosine"
gtgaggaagacggaagttccggagaaggagcggggcatgaaaatggggaaacttgaagtgcggtcagacaactgggatcagtgcgaatctagtggctggtttctgccactgagcagtcagga

SEQ ID NO: 24181 - DNA, 122 bp, Homo sapiens
  misc_feature (61)..(62): /note="This region represents a CpG dinucleotide"
  misc_feature (61)..(61): /note="Nucleotide may be methylated to form 5-methylcytosine"
cctagggccgcagccggaatcccgggccacatcccctgccccgttgtgccttccacacctcgggcagtcactaggaaaagggtcgccaactgaaaggcctgcaggaaccaggatgatacctg

SEQ ID NO: 24182 - DNA, 122 bp, Homo sapiens
  misc_feature (61)..(62): /note="This region represents a CpG dinucleotide"
  misc_feature (61)..(61): /note="Nucleotide may be methylated to form 5-methylcytosine"
ttatgcatttaatcctcccaacagcccagaggcagatatattatctccattttgcagatacggagaaggcaaataactctcccagctagtcagtggtgaagctgagatttaaatccaagcag

SEQ ID NO: 24183 - DNA, 122 bp, Homo sapiens
  misc_feature (61)..(62): /note="This region represents a CpG dinucleotide"
  misc_feature (61)..(61): /note="Nucleotide may be methylated to form 5-methylcytosine"
agatgactgccaggattccagatattatcacaacactttccccttggaatttattggctacgactgagtcatgtggccactcatagatgcaagggaggctgagtaagcaagtgtcagacata

SEQ ID NO: 24184 - DNA, 122 bp, Homo sapiens
  misc_feature (61)..(62): /note="This region represents a CpG dinucleotide"
  misc_feature (61)..(61): /note="Nucleotide may be methylated to form 5-methylcytosine"
ctttcctcactgtgtgaagttccggctccttgcccaagctgggtacaatgtcccgtacaacggggaaacctgatacacacgatgatatccggtgatgcagctacacacctcagggacaactc

SEQ ID NO: 24185 - DNA, 122 bp, Homo sapiens
  misc_feature (61)..(62): /note="This region represents a CpG dinucleotide"
  misc_feature (61)..(61): /note="Nucleotide may be methylated to form 5-methylcytosine"
ggcccagaccttgagtcctcagggacactgtgttgctgagcagggcagctctggagtggccgtggaggggagggagtgatggtttctagtggagaccagggaaggcttcttggaggaggcat

SEQ ID NO: 24186 - DNA, 122 bp, Homo sapiens
  misc_feature (61)..(62): /note="This region represents a CpG dinucleotide"
  misc_feature (61)..(61): /note="Nucleotide may be methylated to form 5-methylcytosine"
aaagtactggcattacaggcgtgagccaccatgcccggccactttagttctatttcagaacgatatttcagcatattttttgaaatgtctagggagatgtagaaacatttaaaagacactta

SEQ ID NO: 24187 - DNA, 122 bp, Homo sapiens
  misc_feature (61)..(62): /note="This region represents a CpG dinucleotide"
  misc_feature (61)..(61): /note="Nucleotide may be methylated to form 5-methylcytosine"
tcaacaattgtaaaggtcacatgctgacgcgacagttgctgaggctgtgatgcaaacgcacgcaggaagcgttgtgcaagcaggctctggagacccgcaggctcctgggcagagggctgcct

SEQ ID NO: 24188 - DNA, 122 bp, Homo sapiens
  misc_feature (61)..(62): /note="This region represents a CpG dinucleotide"
  misc_feature (61)..(61): /note="Nucleotide may be methylated to form 5-methylcytosine"
attgctcatgaattaataggctaaaaggccttattgtttcctggtgggactctttcacagcgctggagaaaactgaataccaagtgttgctcatcatgtgtcttgggatatgttactgaggg

SEQ ID NO: 24189 - DNA, 122 bp, Homo sapiens
  misc_feature (61)..(62): /note="This region represents a CpG dinucleotide"
  misc_feature (61)..(61): /note="Nucleotide may be methylated to form 5-methylcytosine"
tacctgatagttcatctacaagactgataacatcatctgctgtccactctttagtgctagcgtcatatagtaacttaatggcatcagccaaacctttcagactgaattcatctgtaggttct

SEQ ID NO: 24190 - DNA, 122 bp, Homo sapiens
  misc_feature (61)..(62): /note="This region represents a CpG dinucleotide"
  misc_feature (61)..(61): /note="Nucleotide may be methylated to form 5-methylcytosine"
agtggtatattctttctgtcatcacttcatagaaggcacgatgactcaggacaggatagacgcaatttgatggacgagagattctggtgaagtctagtgcatacaatgccctgaagatggca

SEQ ID NO: 24191 - DNA, 122 bp, Homo sapiens
  misc_feature (61)..(62): /note="This region represents a CpG dinucleotide"
  misc_feature (61)..(61): /note="Nucleotide may be methylated to form 5-methylcytosine"
atatttttgtaaatactgtttactgtaaatacaatttactgaaatctcaagtttggaaatcggtcacaaatactgctcagtagactcattatagttacagaacaaagtttaaatattacaaa

SEQ ID NO: 24192 - DNA, 122 bp, Homo sapiens
  misc_feature (61)..(62): /note="This region represents a CpG dinucleotide"
  misc_feature (61)..(61): /note="Nucleotide may be methylated to form 5-methylcytosine"
taaatccagatgacacactcctctgaaggcctggagatcatgtggttggtgagaggagagcgctaagaacaggcttggctcagaggaggatgctgctggataaggtgttattatctatttga

SEQ ID NO: 24193 - DNA, 122 bp, Homo sapiens
  misc_feature (61)..(62): /note="This region represents a CpG dinucleotide"
  misc_feature (61)..(61): /note="Nucleotide may be methylated to form 5-methylcytosine"
ctgccggcctggacagggaagacaagggcctgggatcagcaggacttggaaaggaaatgacggaagcccatagcttatgaagtgattagtcagagtgcttgaagaacaccatgcacattccc

SEQ ID NO: 24194 - DNA, 122 bp, Homo sapiens
  misc_feature (61)..(62): /note="This region represents a CpG dinucleotide"
  misc_feature (61)..(61): /note="Nucleotide may be methylated to form 5-methylcytosine"
tttaagagacagggtcctgctctgtcacccagcttgtagtgtagttgagcaatcatgactcggcgcagccacaactttctgggcacaagcaatcctcctgcctcagcctcctgagtagctgg

SEQ ID NO: 24195 - DNA, 122 bp, Homo sapiens
  misc_feature (61)..(62): /note="This region represents a CpG dinucleotide"
  misc_feature (61)..(61): /note="Nucleotide may be methylated to form 5-methylcytosine"
tcttttgcacagtcccttaacatggagaagcaaaataaaataacctgaccagtcatctctcggtgatttagtgtggaggggtgagtgtgagggtatgtggctctgttctcaagggcacatgc

SEQ ID NO: 24196 - DNA, 122 bp, Homo sapiens
  misc_feature (61)..(62): /note="This region represents a CpG dinucleotide"
  misc_feature (61)..(61): /note="Nucleotide may be methylated to form 5-methylcytosine"
ccagtaacaccactcggtggaaagtggcttatggctcttttatacaataggagacacttgcgtggggcactaataactcatgtgagtcagacagacactcttcctgttgggtttaagaatac

SEQ ID NO: 24197 - DNA, 122 bp, Homo sapiens
  misc_feature (61)..(62): /note="This region represents a CpG dinucleotide"
  misc_feature (61)..(61): /note="Nucleotide may be methylated to form 5-methylcytosine"
cttcctggtctgtgctaggtctaggctgggcactggggatgcagaagtgtgagtcagccacggtgactcaaggaatcaccgagacacctgcagaaatattccttgggcagcgggttggtacc

SEQ ID NO: 24198 - DNA, 122 bp, Homo sapiens
  misc_feature (61)..(62): /note="This region represents a CpG dinucleotide"
  misc_feature (61)..(61): /note="Nucleotide may be methylated to form 5-methylcytosine"
gtgttcagagaggaagaaacagttcaatctgattgcagccaaggatgtaaaacagaattacgaaacactggggtctgagaagttgacagcatttgcatatatttcctatttacaaggctact

SEQ ID NO: 24199 - DNA, 122 bp, Homo sapiens
  misc_feature (61)..(62): /note="This region represents a CpG dinucleotide"
  misc_feature (61)..(61): /note="Nucleotide may be methylated to form 5-methylcytosine"
ggctgcaggtgcaaatagggttgaattcaggatagggccttctctcctgcccagcctgaccgctgagtagcctctggactggaatgaaaggctttccagtaagtgccttgctggactgcagc

SEQ ID NO: 24200 - DNA, 122 bp, Homo sapiens
  misc_feature (61)..(62): /note="This region represents a CpG dinucleotide"
  misc_feature (61)..(61): /note="Nucleotide may be methylated to form 5-methylcytosine"
aacatttccagaatgcaagaagcttcttccttgttgccttccagtcaaccagttaatactcgctgcaaaaggtaaactctcttgccttcttttgaactttctatcaatgcaatcagtaaagt

SEQ ID NO: 24201 - DNA, 122 bp, Homo sapiens
  misc_feature (61)..(62): /note="This region represents a CpG dinucleotide"
  misc_feature (61)..(61): /note="Nucleotide may be methylated to form 5-methylcytosine"
gggctcggctgcaggctttctcagtcttgagctgcacagacccattcacttgcagagccacgtgaggactgaagatgatgtcaataaagacctagctgggggctggcatgtagctggtgcct

SEQ ID NO: 24202 - DNA, 122 bp, Homo sapiens
  misc_feature (61)..(62): /note="This region represents a CpG dinucleotide"
  misc_feature (61)..(61): /note="Nucleotide may be methylated to form 5-methylcytosine"
gtgaccaggcagtgtctgtggctaggccatatcagcatagacaatgcagcaagcctttctcgttctgccagtgaaatccagtcacgttcctgcagactcaccataggtgtgttccagtagct

SEQ ID NO: 24203 - DNA, 122 bp, Homo sapiens
  misc_feature (61)..(62): /note="This region represents a CpG dinucleotide"
  misc_feature (61)..(61): /note="Nucleotide may be methylated to form 5-methylcytosine"
gctacggtgcacctgagacggggtttgtcaccaagaaaaaggtcagacatagagcaacaccgagcacatgggaagagtaataatcgtccagaaatacaccatcgactgtgccattatcagaa

SEQ ID NO: 24204 - DNA, 122 bp, Homo sapiens
  misc_feature (61)..(62): /note="This region represents a CpG dinucleotide"
  misc_feature (61)..(61): /note="Nucleotide may be methylated to form 5-methylcytosine"
tcaatctaagaagcacaaaaccaagtgcactgcctcattgggcaagagaaaagtgatgagcgtgcagagagatgcctggcaaagaagattacaaacagcttgtttggaaagagtatttgagt

SEQ ID NO: 24205 - DNA, 122 bp, Homo sapiens
  misc_feature (61)..(62): /note="This region represents a CpG dinucleotide"
  misc_feature (61)..(61): /note="Nucleotide may be methylated to form 5-methylcytosine"
tttcagctaagacaccacactggaagggacattacataacaaaggtctttaatactatcacggagcttacaataagtataatctgacagaaggcagggagtcaccgttatgagatcagaaaa

SEQ ID NO: 24206 - DNA, 122 bp, Homo sapiens
  misc_feature (61)..(62): /note="This region represents a CpG dinucleotide"
  misc_feature (61)..(61): /note="Nucleotide may be methylated to form 5-methylcytosine"
tcacagggcagccatcttcaagtcccattcactttggcagctagtggttctttctcactccgctagtaaaggccctatggaaggagtaaggaagctctgttttttgcttactcctttgagta

SEQ ID NO: 24207 - DNA, 122 bp, Homo sapiens
  misc_feature (61)..(62): /note="This region represents a CpG dinucleotide"
  misc_feature (61)..(61): /note="Nucleotide may be methylated to form 5-methylcytosine"
atctacaagtcatcgggtgtccactcgccttctctccatttcaggaagtcttcctccacccgccccacctgctttgtgctcagcaaccagcgttcaagagatcttcaaagaataaatgtagg

SEQ ID NO: 24208 - DNA, 122 bp, Homo sapiens
  misc_feature (61)..(62): /note="This region represents a CpG dinucleotide"
  misc_feature (61)..(61): /note="Nucleotide may be methylated to form 5-methylcytosine"
gaaataagtgctttacttattcaacactttcaactatgaattgatgacaatcaaggttcacggcactaggtgctgccatattgcaccagacagactgaagacaaggttgtgagtggtccaag

SEQ ID NO: 24209 - DNA, 122 bp, Homo sapiens
  misc_feature (61)..(62): /note="This region represents a CpG dinucleotide"
  misc_feature (61)..(61): /note="Nucleotide may be methylated to form 5-methylcytosine"
cagtcacctcttgaacttttggggtgcttggcaatagttcctctccctactcctaatttacggcaggccttagaaaccataaccttattttaaaggtgtaaaaaaaaaaagatttaagacaa

SEQ ID NO: 24210 - DNA, 122 bp, Homo sapiens
  misc_feature (61)..(62): /note="This region represents a CpG dinucleotide"
  misc_feature (61)..(61): /note="Nucleotide may be methylated to form 5-methylcytosine"
ccaattgttttaagatgcgcgccattctgatgggcccaaaaatgtgttttcagaaaacaacgtgacattaagaaatgaatttaaaattagagttttaaaaacatatttggattaaactgatg

SEQ ID NO: 24211 - DNA, 122 bp, Homo sapiens
  misc_feature (61)..(62): /note="This region represents a CpG dinucleotide"
  misc_feature (61)..(61): /note="Nucleotide may be methylated to form 5-methylcytosine"
tcccaacatatatgaccttttgtggttccctcccacattggctctggcttggccatgtgacgcttggtctagtagggcattagcaagtatgacacatgcatttgggatttgcttgcttggaa

SEQ ID NO: 24212 - DNA, 122 bp, Homo sapiens
  misc_feature (61)..(62): /note="This region represents a CpG dinucleotide"
  misc_feature (61)..(61): /note="Nucleotide may be methylated to form 5-methylcytosine"
aggaaaaccatgaagtgttagcactgttctgattttacttcctccttcaggctatgggcgcgtgccaactgacagggcagggactgccatggctagtggctattacctaaactccagcccag

SEQ ID NO: 24213 - DNA, 122 bp, Homo sapiens
  misc_feature (61)..(62): /note="This region represents a CpG dinucleotide"
  misc_feature (61)..(61): /note="Nucleotide may be methylated to form 5-methylcytosine"
atttcctcatgcagattttgctgccacctcattgttggcaaacaggtgtatgggataaggcgggtgccatttcccagagtgtattacagtttagttgagcagctgtgatctgttttgctctg

SEQ ID NO: 24214 - DNA, 122 bp, Homo sapiens
  misc_feature (61)..(62): /note="This region represents a CpG dinucleotide"
  misc_feature (61)..(61): /note="Nucleotide may be methylated to form 5-methylcytosine"
gtcgttttgcagaatggattaggcattgagggcagtgccaggttcccatcctatcaacggcgtgagaaaatttcccagggtgttccacggctgggaacctgctgcgccgctttgtccctggc

SEQ ID NO: 24215 - DNA, 122 bp, Homo sapiens
  misc_feature (61)..(62): /note="This region represents a CpG dinucleotide"
  misc_feature (61)..(61): /note="Nucleotide may be methylated to form 5-methylcytosine"
gtgattcccacctagtttagtggaaggaaatatcacccaaggactgcaatactataggtgcgtctgtgattagtcacggagcatatttgagtactgagacctaattgcaggcctaaggtcaa

SEQ ID NO: 24216 - DNA, 122 bp, Homo sapiens
  misc_feature (61)..(62): /note="This region represents a CpG dinucleotide"
  misc_feature (61)..(61): /note="Nucleotide may be methylated to form 5-methylcytosine"
tggctcataactttcttctgagcccatgaagttacttccccagacaagctctgtcatctgcgtgagatgacttatccattagcaaggatgaataatgcctaaacacatcactggatcttccc

SEQ ID NO: 24217 - DNA, 122 bp, Homo sapiens
  misc_feature (61)..(62): /note="This region represents a CpG dinucleotide"
  misc_feature (61)..(61): /note="Nucleotide may be methylated to form 5-methylcytosine"
atgcctggccactgagaaacgaaatcggaggcagatatttctgacagcgagcctccctgccgggtgctttatcattctttatgttaaatacatcaccacatctaagcccttgcaagccgaga

SEQ ID NO: 24218 - DNA, 122 bp, Homo sapiens
  misc_feature (61)..(62): /note="This region represents a CpG dinucleotide"
  misc_feature (61)..(61): /note="Nucleotide may be methylated to form 5-methylcytosine"
tgacgtccacagagaggtgtacaattggagtgggggaggcaggagaagccaggtgtcccacggtctgtctgtaggcacatcgtcctgctggaacaggcatgacaccctcaggtggggacctt

SEQ ID NO: 24219 - DNA, 122 bp, Homo sapiens
  misc_feature (61)..(62): /note="This region represents a CpG dinucleotide"
  misc_feature (61)..(61): /note="Nucleotide may be methylated to form 5-methylcytosine"
gggcttgctagccacacactgcagtatcattaaccaaatcctctcacaagagcccatcagcgtccaacacccgaaggccattctggaagtgcctgatgcccatccagagtcactaggggaga

SEQ ID NO: 24220 - DNA, 122 bp, Homo sapiens
  misc_feature (61)..(62): /note="This region represents a CpG dinucleotide"
  misc_feature (61)..(61): /note="Nucleotide may be methylated to form 5-methylcytosine"
tgtgcacgtgcacgggcctgggggtattgctgttcttccagcttcctcctacctgagcagcgtggaggtcggcaatgggcttggcctggcgcagtggggacggctccaggtccgagcggtcc

SEQ ID NO: 24221 - DNA, 122 bp, Homo sapiens
  misc_feature (61)..(62): /note="This region represents a CpG dinucleotide"
  misc_feature (61)..(61): /note="Nucleotide may be methylated to form 5-methylcytosine"
aaaagtcttgtttatcttagctaaatatctcaattaaaacactccattctgaaagcatgacgtggcatttggcaccttcgtggtagcacaaaacagctggcgagatgctctgtgctccgaat

SEQ ID NO: 24222 - DNA, 122 bp, Homo sapiens
  misc_feature (61)..(62): /note="This region represents a CpG dinucleotide"
  misc_feature (61)..(61): /note="Nucleotide may be methylated to form 5-methylcytosine"
gaataatcacccacactaatctgattctagaagttcctgactttgtgggcttccagatggcgggtagcattgagatgtcaccactctgagagtttcacaatttccagagcaacgaacacagc

SEQ ID NO: 24223 - DNA, 122 bp, Homo sapiens
  misc_feature (61)..(62): /note="This region represents a CpG dinucleotide"
  misc_feature (61)..(61): /note="Nucleotide may be methylated to form 5-methylcytosine"
taaccctgggaggtaggtacaatcatccccattcacagaagacaaaatagacttgacaggcgaggtgaaccaacctgcccaaaggtcacaccactgggaggtagtaacgcccaatttcaagt

SEQ ID NO: 24224 - DNA, 122 bp, Homo sapiens
  misc_feature (61)..(62): /note="This region represents a CpG dinucleotide"
  misc_feature (61)..(61): /note="Nucleotide may be methylated to form 5-methylcytosine"
aggtaattgtcaaagtcaccggaggctctatgatgtgaaatgtacaatcgaattagaactcgccccttaccaaccattccaaatagcttgtcctgtcctttcgaatttgggtttgcccaatg

SEQ ID NO: 24225 - DNA, 122 bp, Homo sapiens
  misc_feature (61)..(62): /note="This region represents a CpG dinucleotide"
  misc_feature (61)..(61): /note="Nucleotide may be methylated to form 5-methylcytosine"
aatccccatggggccagggaaagcccgctgcagactggtttaccagaatatttttgtccacggctcccagaccaagctaaaaaataaaaaccgcacgagagaaaaggcctttgcgagtggaa

SEQ ID NO: 24226 - DNA, 122 bp, Homo sapiens
  misc_feature (61)..(62): /note="This region represents a CpG dinucleotide"
  misc_feature (61)..(61): /note="Nucleotide may be methylated to form 5-methylcytosine"
ggctgcggagctcgtggatgccgtgtgcgaactggcacttgtccccgtacttacaggcaccgttttcctcaaaggggcggcacagctccgtcttgtagcggctggagttgacctggccgccc

SEQ ID NO: 24227 - DNA, 122 bp, Homo sapiens
  misc_feature (61)..(62): /note="This region represents a CpG dinucleotide"
  misc_feature (61)..(61): /note="Nucleotide may be methylated to form 5-methylcytosine"
ctagattctcctgactgctggcattccttggcttatggttgtatcactccagtatctgcccgtgccttcatatcgccttctctgtggatgtgtcacatctccttctgcttttctcttataag

SEQ ID NO: 24228 - DNA, 122 bp, Homo sapiens
  misc_feature (61)..(62): /note="This region represents a CpG dinucleotide"
  misc_feature (61)..(61): /note="Nucleotide may be methylated to form 5-methylcytosine"
ccatacacatgtttgggtccagccattggcaccaggtgactcagcctttgagcctggccacgcttggtcaggaacacgtgagatccccagcatgtgaccaagcctcaagcattcatgtgggc

SEQ ID NO: 24229 - DNA, 122 bp, Homo sapiens
  misc_feature (61)..(62): /note="This region represents a CpG dinucleotide"
  misc_feature (61)..(61): /note="Nucleotide may be methylated to form 5-methylcytosine"
atgaaaattaaatatgacttagaagcattgatttatgaaggcttatgatgtcatcggtttcgacagaaagcaaactccagcaggctgtgagcctacagggagttgacccagaaacatgcatg

SEQ ID NO: 24230 - DNA, 122 bp, Homo sapiens
  misc_feature (61)..(62): /note="This region represents a CpG dinucleotide"
  misc_feature (61)..(61): /note="Nucleotide may be methylated to form 5-methylcytosine"
agagaggctgttattgtttgtcattagcaccctggaacctttttcatcttcaaagctcctcgcaaaagggttcattaaccgtcgccctctttcctgtgagagagtaaacaagtatgattagt

SEQ ID NO: 24231 - DNA, 122 bp, Homo sapiens
  misc_feature (61)..(62): /note="This region represents a CpG dinucleotide"
  misc_feature (61)..(61): /note="Nucleotide may be methylated to form 5-methylcytosine"
attcttctggaaaagcctccatatgccccaccagactgtcagaggactccagatacagaacggtctcgatgccctgactcagcaagagtgactgagtcaaatcctgactgtctcatatacca

SEQ ID NO: 24232 - DNA, 122 bp, Homo sapiens
  misc_feature (61)..(62): /note="This region represents a CpG dinucleotide"
  misc_feature (61)..(61): /note="Nucleotide may be methylated to form 5-methylcytosine"
tgacggttcctgctggccaagaacagcactgggtatttgcatgggcaaagactttaacagcgtgaacaggattttctgaacaagtctggaaataaaatacctaccagctttcagagtaaatt

SEQ ID NO: 24233 - DNA, 122 bp, Homo sapiens
  misc_feature (61)..(62): /note="This region represents a CpG dinucleotide"
  misc_feature (61)..(61): /note="Nucleotide may be methylated to form 5-methylcytosine"
agatggaaacccctccagagcagggactatgctctacgcttggcatctccagaagcccagcgtgaggaggcacctcacccacccatcaggaacttgaagtgtttccaatagcaaatcccctt

SEQ ID NO: 24234 - DNA, 122 bp, Homo sapiens
  misc_feature (61)..(62): /note="This region represents a CpG dinucleotide"
  misc_feature (61)..(61): /note="Nucleotide may be methylated to form 5-methylcytosine"
gttggtgtggcattatataaaatgtggccagttacaggacaaagttccctcattccttctcgtctttcgtgtttctcttcacatatttgttttttcacatatctgatctcacacttgcattt

SEQ ID NO: 24235 - DNA, 122 bp, Homo sapiens
  misc_feature (61)..(62): /note="This region represents a CpG dinucleotide"
  misc_feature (61)..(61): /note="Nucleotide may be methylated to form 5-methylcytosine"
agccacaattaccaaggcaattttgcaatgctgttttatttccacttatcctctggggtgcgcaggagaatattttaccttcgatcaagaggcctcgccgctgcctgcctcacagccctgca

SEQ ID NO: 24236 - DNA, 122 bp, Homo sapiens
  misc_feature (61)..(62): /note="This region represents a CpG dinucleotide"
  misc_feature (61)..(61): /note="Nucleotide may be methylated to form 5-methylcytosine"
tgaagctttagggaaatttttcattaaggcattccatcactgggataaccagtttctccccgaaaggtacaaccaatctccagtccttgaaattcaacagcttgctttgtggacaatggcta

SEQ ID NO: 24237 - DNA, 122 bp, Homo sapiens
  misc_feature (61)..(62): /note="This region represents a CpG dinucleotide"
  misc_feature (61)..(61): /note="Nucleotide may be methylated to form 5-methylcytosine"
gtcctgcgccttagagagatgcgtgaatcccttacctttaccatactctgaattggtcaacggcagaatggaagccctacaaaaattgaaaagttggttgcatgctaacattcatagtggaa

SEQ ID NO: 24238 - DNA, 122 bp, Homo sapiens
  misc_feature (61)..(62): /note="This region represents a CpG dinucleotide"
  misc_feature (61)..(61): /note="Nucleotide may be methylated to form 5-methylcytosine"
atactaaactcacaagttgttgtaaggattaaacaagaaaatacatttacatttttgagacggtgcttggcagatagcacatgctcaataaatggtagctattattattaacattgtatgag

SEQ ID NO: 24239 - DNA, 122 bp, Homo sapiens
  misc_feature (61)..(62): /note="This region represents a CpG dinucleotide"
  misc_feature (61)..(61): /note="Nucleotide may be methylated to form 5-methylcytosine"
ggagatgagactttcctctgaaagctaaggtaaagggcaggcagggagggtggggaatcacgatgcttccagagcttcccggtgacacaggtcaatgtgtcccccatcgggcttctcaggcc

SEQ ID NO: 24240 - DNA, 122 bp, Homo sapiens
  misc_feature (61)..(62): /note="This region represents a CpG dinucleotide"
  misc_feature (61)..(61): /note="Nucleotide may be methylated to form 5-methylcytosine"
atatgcattggcactgttatccccattttacagatgaggaaactaaggtgagagaggctgcgtaatatgtctgaggtcatagagctattgagtggatgagtcaggattcattctggcaccag

SEQ ID NO: 24241 - DNA, 122 bp, Homo sapiens
  misc_feature (61)..(62): /note="This region represents a CpG dinucleotide"
  misc_feature (61)..(61): /note="Nucleotide may be methylated to form 5-methylcytosine"
acagccagactgttcttcagtagcggttgccagtttctttcatcacccaaactgtgtgagcgcatgtaccggttcatctgctggacgcagtgccagcaagtgtagattgcgaccctctgtag

SEQ ID NO: 24242 - DNA, 122 bp, Homo sapiens
  misc_feature (61)..(62): /note="This region represents a CpG dinucleotide"
  misc_feature (61)..(61): /note="Nucleotide may be methylated to form 5-methylcytosine"
ccatggggggtttcccgatgggaggaggcaggggtggggctggggaacaaagactttacacgacataaaatcaaaggagcagcctcaaccagttctgtaaaatgggtttgaggttggggatc

SEQ ID NO: 24243 - DNA, 122 bp, Homo sapiens
  misc_feature (61)..(62): /note="This region represents a CpG dinucleotide"
  misc_feature (61)..(61): /note="Nucleotide may be methylated to form 5-methylcytosine"
catcctgcataaaacataacaaaaatactttgtacataactaagcttgaaagaaagaaggcggactctcagaagcgaagagagaactgaaagttagagcaatgcttttcagcctacctatgc

SEQ ID NO: 24244 - DNA, 122 bp, Homo sapiens
  misc_feature (61)..(62): /note="This region represents a CpG dinucleotide"
  misc_feature (61)..(61): /note="Nucleotide may be methylated to form 5-methylcytosine"
ccagagaggtgaagggctgttcggtcattgcccatggagccaggggagctgtgggccttccgccgccaacctctgggctagccctgcagagatgctaggaggatgcagggaggtgaggtggg

SEQ ID NO: 24245 - DNA, 122 bp, Homo sapiens
  misc_feature (61)..(62): /note="This region represents a CpG dinucleotide"
  misc_feature (61)..(61): /note="Nucleotide may be methylated to form 5-methylcytosine"
gaagtgtaatttttcattgcagaagtgcaattccactgctgagagtttgagaaaccccagcgtggggccccttctgagacagatggcctgccttcctgggtttcagttctgccagcctctcc

SEQ ID NO: 24246 - DNA, 122 bp, Homo sapiens
  misc_feature (61)..(62): /note="This region represents a CpG dinucleotide"
  misc_feature (61)..(61): /note="Nucleotide may be methylated to form 5-methylcytosine"
cattcacaggtgagagacagaacaatgtagtcaagtcagttcatcagcatgttggcaaatcggagtcccaggcttggagaagacctttgcagtgaaggcatgtggaaagagaatgtggcaag

SEQ ID NO: 24247 - DNA, 122 bp, Homo sapiens
  misc_feature (61)..(62): /note="This region represents a CpG dinucleotide"
  misc_feature (61)..(61): /note="Nucleotide may be methylated to form 5-methylcytosine"
catcatgcacccatcacccagcacagtccaggtgtgttgtaccatgggtgttaggtggcacgatggtggtgatgaggatgtaatccactggcttaaaccctgcccagctcacatactccctc

SEQ ID NO: 24248 - DNA, 122 bp, Homo sapiens
  misc_feature (61)..(62): /note="This region represents a CpG dinucleotide"
  misc_feature (61)..(61): /note="Nucleotide may be methylated to form 5-methylcytosine"
cttcctcccctgtagttaataagccatcgcttataccacggtattttgttgtttgactcacgtctccagtgtaacagtggaaagtcattatctctggctttggtgttaacatagggagggat

SEQ ID NO: 24249 - DNA, 122 bp, Homo sapiens
  misc_feature (61)..(62): /note="This region represents a CpG dinucleotide"
  misc_feature (61)..(61): /note="Nucleotide may be methylated to form 5-methylcytosine"
accaggctcttctctcacatgggatctatttcattgccctctaattggtctctctgtcttcgtaagcttcaacactaaaaatctacttgaacagtctttacagaacgttagacaaaacatct

SEQ ID NO: 24250 - DNA, 122 bp, Homo sapiens
  misc_feature (61)..(62): /note="This region represents a CpG dinucleotide"
  misc_feature (61)..(61): /note="Nucleotide may be methylated to form 5-methylcytosine"
aactttagagaattctaattctcctgtgccagagtttagccatgggattggtattagtaacgctgactcacagtctacttgtgatgcagaaagaggaaactcagagcaggcggaaatgagag

SEQ ID NO: 24251 - DNA, 122 bp, Homo sapiens
  misc_feature (61)..(62): /note="This region represents a CpG dinucleotide"
  misc_feature (61)..(61): /note="Nucleotide may be methylated to form 5-methylcytosine"
tgatcctcaccagaacccagtgagggtaatattataattcttattttacaattgaggaaacgaagactgagaaagtgaaagactggctcaagactggtctcacagctagaaactaggtggaa

SEQ ID NO: 24252 - DNA, 122 bp, Homo sapiens
  misc_feature (61)..(62): /note="This region represents a CpG dinucleotide"
  misc_feature (61)..(61): /note="Nucleotide may be methylated to form 5-methylcytosine"
ctaactgaattctgttgacctattcaaccactaggaagagctacagcttttctctgtggacgttcttcctcccgaggctgtttaggtttctcctcctcccctgtgccttaggtagtgtttct

SEQ ID NO: 24253 - DNA, 122 bp, Homo sapiens
  misc_feature (61)..(62): /note="This region represents a CpG dinucleotide"
  misc_feature (61)..(61): /note="Nucleotide may be methylated to form 5-methylcytosine"
taacatccatctccttgtaatgtgtgcatcgttttatcacactggagattaagttcctctcgtaaaggcctttacatttttgagactcacttttaacagagctctttccaaagcactattgt

SEQ ID NO: 24254 - DNA, 122 bp, Homo sapiens
  misc_feature (61)..(62): /note="This region represents a CpG dinucleotide"
  misc_feature (61)..(61): /note="Nucleotide may be methylated to form 5-methylcytosine"
ccccaaattctttaccattaccgtgaaacgaaacacccttgctcaacaaaatgatttgttcgtttatataaaatgactcataaaataaaactttatttctgattcaaacaacaacatccaat

SEQ ID NO: 24255 - DNA, 122 bp, Homo sapiens
  misc_feature (61)..(62): /note="This region represents a CpG dinucleotide"
  misc_feature (61)..(61): /note="Nucleotide may be methylated to form 5-methylcytosine"
acactgtctgtaccagctctcaaaggactatgtggctcagagctgtctgccaaccctgagcgagtcatctaagaccaaaatatgacagaggcaaccttctgcattctctgagttagtgggtc

SEQ ID NO: 24256 - DNA, 122 bp, Homo sapiens
  misc_feature (61)..(62): /note="This region represents a CpG dinucleotide"
  misc_feature (61)..(61): /note="Nucleotide may be methylated to form 5-methylcytosine"
ggatgtggccggtcttggtgccggtggctggcggtgctcaggaagcagtacctgttctcacgcttgctgggtgaaactggagcctgctgttccagtgggagggatttaagtgtaggagttga

SEQ ID NO: 24257 - DNA, 122 bp, Homo sapiens
  misc_feature (61)..(62): /note="This region represents a CpG dinucleotide"
  misc_feature (61)..(61): /note="Nucleotide may be methylated to form 5-methylcytosine"
cctgcactcatcacatatgcagtgtgtgtcctcagctgttcctcagaaagcaaatataggcgccagcgaggccattgtgctctgagcagctctgtcaccccatcagacccggctggcacaat

SEQ ID NO: 24258 - DNA, 122 bp, Homo sapiens
  misc_feature (61)..(62): /note="This region represents a CpG dinucleotide"
  misc_feature (61)..(61): /note="Nucleotide may be methylated to form 5-methylcytosine"
aaagctgccaagcagagacagcctctcctgcccctttcccagggctgactcagcaccttacgcgtgaggatttgtcatcaacaactgaccccaaaagccatggtgccctggggttggtgtcc

SEQ ID NO: 24259 - DNA, 122 bp, Homo sapiens
  misc_feature (61)..(62): /note="This region represents a CpG dinucleotide"
  misc_feature (61)..(61): /note="Nucleotide may be methylated to form 5-methylcytosine"
gatgtgtgcattcatgagctcaggtgagttttacctgttgagtcaggtggcatatggggccgagacccaggctgatgctgaggaactgtgggatctaccacagtccaccttcatccactgca

SEQ ID NO: 24260 - DNA, 122 bp, Homo sapiens
  misc_feature (61)..(62): /note="This region represents a CpG dinucleotide"
  misc_feature (61)..(61): /note="Nucleotide may be methylated to form 5-methylcytosine"
gtgtgagccactgtgcccaacccaaatcctctttttgtgttccactcttaaataggagtacgtagtgggccgggtgtggtggctcacctctaatcccagcattttgggaggctgaggtggga

SEQ ID NO: 24261 - DNA, 122 bp, Homo sapiens
  misc_feature (61)..(62): /note="This region represents a CpG dinucleotide"
  misc_feature (61)..(61): /note="Nucleotide may be methylated to form 5-methylcytosine"
ctatgagaggcaggtaactatggtggaagctccatgggctgatgcctccttgtttccctgcgcagccctggagccaggtgacttggtgatgactaaattattattgctcctcagttccgtgt

SEQ ID NO: 24262 - DNA, 122 bp, Homo sapiens
  misc_feature (61)..(62): /note="This region represents a CpG dinucleotide"
  misc_feature (61)..(61): /note="Nucleotide may be methylated to form 5-methylcytosine"
ttacttgtggaattcttcaatgacagttgacactcccatatataagctccaggcagagaccgtgtctatattctcacctttgcacaacatctagctcagagccacaaaaagtaggcactcat

SEQ ID NO: 24263 - DNA, 122 bp, Homo sapiens
  misc_feature (61)..(62): /note="This region represents a CpG dinucleotide"
  misc_feature (61)..(61): /note="Nucleotide may be methylated to form 5-methylcytosine"
ctcttcctgtcaattctttacgaaatgccactaatttcagcattagtatgcacaatatatcgttatattctgctcaaatatattaagtaattctaggccaggtgtggtggctcacaactgta

SEQ ID NO: 24264 - DNA, 122 bp, Homo sapiens
  misc_feature (61)..(62): /note="This region represents a CpG dinucleotide"
  misc_feature (61)..(61): /note="Nucleotide may be methylated to form 5-methylcytosine"
tcactaaatattggaaggaggccacgttacagagcagagactgaatttctcatccacatccggagccaggcattctggaaatgaggtctgtttgccacctctccccaaagcattgatctctg

SEQ ID NO: 24265 - DNA, 122 bp, Homo sapiens
  misc_feature (61)..(62): /note="This region represents a CpG dinucleotide"
  misc_feature (61)..(61): /note="Nucleotide may be methylated to form 5-methylcytosine"
ttcctggctatccagaagaacaagcctatcagcaagaaggaaatgattcagaggtccaaacggtaagaccaagaaaacaagagtacgtatacaagtgtaaaccaggccaccaagtggtcggg

SEQ ID NO: 24266 - DNA, 122 bp, Homo sapiens
  misc_feature (61)..(62): /note="This region represents a CpG dinucleotide"
  misc_feature (61)..(61): /note="Nucleotide may be methylated to form 5-methylcytosine"
cagcggggcatttcctggccatgtgagccatctgagtgtcagtgcttggggctacatctgcgcagaaccagacatctttagacattctcatgactcattgcactggtacccacaggtctgtt

SEQ ID NO: 24267 - DNA, 122 bp, Homo sapiens
  misc_feature (61)..(62): /note="This region represents a CpG dinucleotide"
  misc_feature (61)..(61): /note="Nucleotide may be methylated to form 5-methylcytosine"
ggggcctggaggaggcggctgccaatcttggggacatctgtgaaagcactgtggattctacgccgtgagaagaggaaacagcgtatattgagaatccactataagtaacacacctgtgaaca

SEQ ID NO: 24268 - DNA, 122 bp, Homo sapiens
  misc_feature (61)..(62): /note="This region represents a CpG dinucleotide"
  misc_feature (61)..(61): /note="Nucleotide may be methylated to form 5-methylcytosine"
aagaagaagaagaagaagaagaggcaggaagagcatttcaggcagaggaaccacagcatgcgcagagcccaggatatcgacgatctacaaaggtcccctatctgcaaagcttcccctacagg

SEQ ID NO: 24269 - DNA, 122 bp, Homo sapiens
  misc_feature (61)..(62): /note="This region represents a CpG dinucleotide"
  misc_feature (61)..(61): /note="Nucleotide may be methylated to form 5-methylcytosine"
cgacaagtgaggggggctagggatctggcggccactgtgggccacggggctcaccccactcggagttgctgagggaccacgtggagcatgcctggaattgtctgagacactgaaaaggggag

SEQ ID NO: 24270 - DNA, 122 bp, Homo sapiens
  misc_feature (61)..(62): /note="This region represents a CpG dinucleotide"
  misc_feature (61)..(61): /note="Nucleotide may be methylated to form 5-methylcytosine"
ccaaagcagtacataatttttgttaattgtgtttacaagtgtgacttcaggattacccagcggtttggaagctgattattcttagtctggagattgagtcatttattcatgaaatatttact

SEQ ID NO: 24271 - DNA, 122 bp, Homo sapiens
  misc_feature (61)..(62): /note="This region represents a CpG dinucleotide"
  misc_feature (61)..(61): /note="Nucleotide may be methylated to form 5-methylcytosine"
tggcatgtgccaggctagagcagcttggctatggcagaacatccagccccaccgtgtggacggtagggtaagacccagccctagtctggcctcagactaagggctcctcatccccaggcttc

SEQ ID NO: 24272 - DNA, 122 bp, Homo sapiens
  misc_feature (61)..(62): /note="This region represents a CpG dinucleotide"
  misc_feature (61)..(61): /note="Nucleotide may be methylated to form 5-methylcytosine"
ctgactcccagctgcggagccgggagggaagctctgcattttgctttgactgtggggtgacgtgtcagttactgtccaaatcagaacctttctgagagtcgacgtgggtactgctgataatt

SEQ ID NO: 24273 - DNA, 122 bp, Homo sapiens
  misc_feature (61)..(62): /note="This region represents a CpG dinucleotide"
  misc_feature (61)..(61): /note="Nucleotide may be methylated to form 5-methylcytosine"
tttccttcagctgatgggacggttgacagtggtcagggatcctctgtcttcacagaatctcgagtgagcagccaacagacagtttcatatggttcccaacatgaacaggcacattctacagg

SEQ ID NO: 24274 - DNA, 122 bp, Homo sapiens
  misc_feature (61)..(62): /note="This region represents a CpG dinucleotide"
  misc_feature (61)..(61): /note="Nucleotide may be methylated to form 5-methylcytosine"
catcttttcatgtgcttgttggaaatttttatatcttctttgatgaagtctctatttaaacgttgcccatttaaaacaagttgggtttgtcttattattgagttgtaagccctcctgatata

SEQ ID NO: 24275 - DNA, 122 bp, Homo sapiens
  misc_feature (61)..(62): /note="This region represents a CpG dinucleotide"
  misc_feature (61)..(61): /note="Nucleotide may be methylated to form 5-methylcytosine"
atatcttcagaagaaactgcacatacataagaaatgaaagcccgctcagcagccttcttccggatccaggagcgagacctctgcctttcgcggggcctgtagttcacactccttccaggtct

SEQ ID NO: 24276 - DNA, 122 bp, Homo sapiens
  misc_feature (61)..(62): /note="This region represents a CpG dinucleotide"
  misc_feature (61)..(61): /note="Nucleotide may be methylated to form 5-methylcytosine"
agcagccacaggcgcacacgctgaccacgctgagcagcgagccgggccagtcccagcgaacgcacatcaagacggagcagctgagccccagccactacagcgagcagcagcagcactcgccc

SEQ ID NO: 24277 - DNA, 122 bp, Homo sapiens
  misc_feature (61)..(62): /note="This region represents a CpG dinucleotide"
  misc_feature (61)..(61): /note="Nucleotide may be methylated to form 5-methylcytosine"
aaataatatattctagaatatgtcacattctgtctcaggcatccattttctttatgatgccgtttgaggtggagttttagtcaggtggtcagcttctccttttttttgccatctgccctgta

SEQ ID NO: 24278 - DNA, 122 bp, Homo sapiens
  misc_feature (61)..(62): /note="This region represents a CpG dinucleotide"
  misc_feature (61)..(61): /note="Nucleotide may be methylated to form 5-methylcytosine"
gtgcgcacattcctagatgctagccctgtggcggcgcacctcacgctcattcacagtacacggacatgctcacctgcccaccatgggtggtcaacccttggacacccacactcttctcacac

SEQ ID NO: 24279 - DNA, 122 bp, Homo sapiens
  misc_feature (61)..(62): /note="This region represents a CpG dinucleotide"
  misc_feature (61)..(61): /note="Nucleotide may be methylated to form 5-methylcytosine"
gtcataatccgtggatgacaagtcagccagggtcagtatgtagtgactctgttgggtgtacgtgcttgagccacacacacagcagtgcaaaacctgtgaaaacagaggccatgtgcaccacg

SEQ ID NO: 24280 - DNA, 122 bp, Homo sapiens
  misc_feature (61)..(62): /note="This region represents a CpG dinucleotide"
  misc_feature (61)..(61): /note="Nucleotide may be methylated to form 5-methylcytosine"
agcaaagccggccagacaacctctccaatctacgatatctatcaaatggggctggagtgtcgtgctctatctcctggggcctttggataaaatccttggcaaattttacattgcagaatgtt

SEQ ID NO: 24281 - DNA, 122 bp, Homo sapiens
  misc_feature (61)..(62): /note="This region represents a CpG dinucleotide"
  misc_feature (61)..(61): /note="Nucleotide may be methylated to form 5-methylcytosine"
ccagcccctggagggcagtgacctctggtccttaaacaaggaggacacgtcggaacaagtcgtgcctgttttggtaaagaactggaagaaggaatgcgccaagactaggaagtaagtgtgag

SEQ ID NO: 24282 - DNA, 122 bp, Homo sapiens
  misc_feature (61)..(62): /note="This region represents a CpG dinucleotide"
  misc_feature (61)..(61): /note="Nucleotide may be methylated to form 5-methylcytosine"
tgcgagccccccttaaaaatagcatctgaagtttcattgtagctgagtcactgcttggtgcgatctagggctaggctgcaactggacctgtcagaatgaggccacagtgattcatgatgaag

SEQ ID NO: 24283 - DNA, 122 bp, Homo sapiens
  misc_feature (61)..(62): /note="This region represents a CpG dinucleotide"
  misc_feature (61)..(61): /note="Nucleotide may be methylated to form 5-methylcytosine"
cccacccagctgaacagcctatacaaactctgcagtcactgccacccctaaaaaggcatacgaagagctcagagtctacactttgtcctctgtcgggctggggtcggcacagatcatagact

SEQ ID NO: 24284 - DNA, 122 bp, Homo sapiens
  misc_feature (61)..(62): /note="This region represents a CpG dinucleotide"
  misc_feature (61)..(61): /note="Nucleotide may be methylated to form 5-methylcytosine"
tgggatttactttaatacaatttagcatgaaatgatatggcagaagcagttaagatgacacgtgtggaaagatcctgataattggtgaatatgagtaatgggtagaaaggtgaactcactat

SEQ ID NO: 24285 - DNA, 122 bp, Homo sapiens
  misc_feature (61)..(62): /note="This region represents a CpG dinucleotide"
  misc_feature (61)..(61): /note="Nucleotide may be methylated to form 5-methylcytosine"
gtaaaaaattacctgtggtttcgcatttgttttctgtctttttctttcttgcttgatcttcgataatactgggaaatgtaaccaatgtgattgggcttgttaatttggtgccttgcttgttt

SEQ ID NO: 24286 - DNA, 122 bp, Homo sapiens
  misc_feature (61)..(62): /note="This region represents a CpG dinucleotide"
  misc_feature (61)..(61): /note="Nucleotide may be methylated to form 5-methylcytosine"
caattatctaagctgcaacttaaaagcaatggcttaaacaagattaagaagctgcttccccggagcttgcagtgagccgagattgcgccactgcagtccgcagtccggcctgggcgacagag

SEQ ID NO: 24287 - DNA, 122 bp, Homo sapiens
  misc_feature (61)..(62): /note="This region represents a CpG dinucleotide"
  misc_feature (61)..(61): /note="Nucleotide may be methylated to form 5-methylcytosine"
ttttacagatccctggcatgtttttctgaccctcactggagttcagtatgagacagaccacgctacaaagagattcctgatctaactctaggctgttcatgagtgttagacacacagtgtga

SEQ ID NO: 24288 - DNA, 122 bp, Homo sapiens
  misc_feature (61)..(62): /note="This region represents a CpG dinucleotide"
  misc_feature (61)..(61): /note="Nucleotide may be methylated to form 5-methylcytosine"
ctcagacctgggtgtctggcaaggctggctttgagttccagcttcaccggtgactgactgcgtgtcagcagctcaggccctgcctttcagtctcctcatccatagaaaggaatgtaatgagt

SEQ ID NO: 24289 - DNA, 122 bp, Homo sapiens
  misc_feature (61)..(62): /note="This region represents a CpG dinucleotide"
  misc_feature (61)..(61): /note="Nucleotide may be methylated to form 5-methylcytosine"
ctcaggtgatctgcctgccttggcctcccaaagtgctgggattacaggcgtgagccaccacgcctggccacagtttattttcctaagtgccaaggttaagcaagtcaaggaaagactgaggg

SEQ ID NO: 24290 - DNA, 122 bp, Homo sapiens
  misc_feature (61)..(62): /note="This region represents a CpG dinucleotide"
  misc_feature (61)..(61): /note="Nucleotide may be methylated to form 5-methylcytosine"
gcgctccgtttggactcagttggtctccttctaatatgacggggaggatctctgctgggccgggggcagtccctccggggacttcaggaggacagaactgacgagtgtctcaagatcctcct

SEQ ID NO: 24291 - DNA, 122 bp, Homo sapiens
  misc_feature (61)..(62): /note="This region represents a CpG dinucleotide"
  misc_feature (61)..(61): /note="Nucleotide may be methylated to form 5-methylcytosine"
accgtgtctgtatacgtgacatgcgtcagcttcaccgccagcgcctcccaactaccactgcgcagcactgagctcctgctgtccctgtagaaactcgtatgactgcagccgtgccagactcg

SEQ ID NO: 24292 - DNA, 122 bp, Homo sapiens
  misc_feature (61)..(62): /note="This region represents a CpG dinucleotide"
  misc_feature (61)..(61): /note="Nucleotide may be methylated to form 5-methylcytosine"
acccattcccctgtctctgttctcttttgcaagcttctgtttgcccactgggggagcttgcgccctactatttttctgttggcgatccacagtttccttaacagcagatccactagcagaac

SEQ ID NO: 24293 - DNA, 122 bp, Homo sapiens
  misc_feature (61)..(62): /note="This region represents a CpG dinucleotide"
  misc_feature (61)..(61): /note="Nucleotide may be methylated to form 5-methylcytosine"
ctcaggaaagctaagttggccgactatcacctcatgtcctgatggttatttatgatgactcggcagagattatgttccttgataaacacagaggaccaggtgtcagcttatattggaacagt

SEQ ID NO: 24294 - DNA, 122 bp, Homo sapiens
  misc_feature (61)..(62): /note="This region represents a CpG dinucleotide"
  misc_feature (61)..(61): /note="Nucleotide may be methylated to form 5-methylcytosine"
gagacagccccaagaagatgggaaaagaccctgctaagcagaatacagcacctgcaaaggcgatgaggaagaaaacaagcttgggatgtgtagggacatcagtgcaactggtgcacagtaaa

SEQ ID NO: 24295 - DNA, 122 bp, Homo sapiens
  misc_feature (61)..(62): /note="This region represents a CpG dinucleotide"
  misc_feature (61)..(61): /note="Nucleotide may be methylated to form 5-methylcytosine"
aaatttcccttgaagcccgacttcatggccggtgagagtcaagagacatggcctggatcccgtgacttacacaaatccctgtggctgactcagaccttagtttctctgcctctgcttgcatg

SEQ ID NO: 24296 - DNA, 122 bp, Homo sapiens
  misc_feature (61)..(62): /note="This region represents a CpG dinucleotide"
  misc_feature (61)..(61): /note="Nucleotide may be methylated to form 5-methylcytosine"
ctcaacccattgttagtggggactgaaacaccactgttcacacaagcacacacaagcccacgtgcccatgtgcctgtatatgctgcttatgcatgcacactactgcgtaagtgcgcacacac

SEQ ID NO: 24297 - DNA, 122 bp, Homo sapiens
  misc_feature (61)..(62): /note="This region represents a CpG dinucleotide"
  misc_feature (61)..(61): /note="Nucleotide may be methylated to form 5-methylcytosine"
ctagatgaactaaagctgccaagtggcaatcaaatggatccctcttcccacctgggatctcgcaggacaagctcgcctggtattggtcatacatttccagactgcttggctggtctagagag

SEQ ID NO: 24298 - DNA, 122 bp, Homo sapiens
  misc_feature (61)..(62): /note="This region represents a CpG dinucleotide"
  misc_feature (61)..(61): /note="Nucleotide may be methylated to form 5-methylcytosine"
cagctgctgcaggaacagcaacccagcaactggccacacagagggcgagtgacccctgggcggactgatgggccacaccacaggccacaccacggaccacaggccacacccagagagctagt

SEQ ID NO: 24299 - DNA, 122 bp, Homo sapiens
  misc_feature (61)..(62): /note="This region represents a CpG dinucleotide"
  misc_feature (61)..(61): /note="Nucleotide may be methylated to form 5-methylcytosine"
ttgcagcctaggcaaaggacatttagtactatcgattctttccaccctcacgatgacttgcggttctctctgtagaaaagggatggcctaagaaatacaactaaaaaaacaaacaaaaacac

SEQ ID NO: 24300 - DNA, 122 bp, Homo sapiens
  misc_feature (61)..(62): /note="This region represents a CpG dinucleotide"
  misc_feature (61)..(61): /note="Nucleotide may be methylated to form 5-methylcytosine"
tttatgaatgttgatatgccctaaagggacatgtgttttagacactaaatgacaggtgaacgcagaccagcatgaggaagtagaagtttggccagcccttggtttagctctaggtaggagcc

SEQ ID NO: 24301 - DNA, 122 bp, Homo sapiens
  misc_feature (61)..(62): /note="This region represents a CpG dinucleotide"
  misc_feature (61)..(61): /note="Nucleotide may be methylated to form 5-methylcytosine"
tctgcatattaaggtgacaattcatcttgattctaactgctgcattttaaaattattttccggctttctgaatttcctgccacacaggtctgacagctgtatctccgctccagctcctggct

SEQ ID NO: 24302 - DNA, 122 bp, Homo sapiens
  misc_feature (61)..(62): /note="This region represents a CpG dinucleotide"
  misc_feature (61)..(61): /note="Nucleotide may be methylated to form 5-methylcytosine"
taggctaccaagaagaactgcatcttcaacaggtttgtgctcagtcattagttttccacacgttctttcagaatgatgtgttgaataaaatacatcattgcacaaatctttgtcaaagagat

SEQ ID NO: 24303 - DNA, 122 bp, Homo sapiens
  misc_feature (61)..(62): /note="This region represents a CpG dinucleotide"
  misc_feature (61)..(61): /note="Nucleotide may be methylated to form 5-methylcytosine"
tacaaagtaaaaatatttacgagagctaaatcagcaaaatgatcaaacataaacattccccgtacatctattctgtttacatatcactcagacaagtgtaaataatcttaatactctgaaga

SEQ ID NO: 24304 - DNA, 122 bp, Homo sapiens
  misc_feature (61)..(62): /note="This region represents a CpG dinucleotide"
  misc_feature (61)..(61): /note="Nucleotide may be methylated to form 5-methylcytosine"
attggaggagggtataactttaagagccagagtgcctgagtttgactcgcagctgtgccacgtactggctgtgtggtcttggggaagttgcttaacctctctgtgcctttgtttccccgtct

SEQ ID NO: 24305 - DNA, 122 bp, Homo sapiens
  misc_feature (61)..(62): /note="This region represents a CpG dinucleotide"
  misc_feature (61)..(61): /note="Nucleotide may be methylated to form 5-methylcytosine"
gcacatgcagccaggtgtgggctgggaatccatgcctcagcttgagtagcacaactctgccgtatcctgcctgagcgggtttgagcaagctgcttaccttgtcagcaaagtgaggaaaatca

SEQ ID NO: 24306 - DNA, 122 bp, Homo sapiens
  misc_feature (61)..(62): /note="This region represents a CpG dinucleotide"
  misc_feature (61)..(61): /note="Nucleotide may be methylated to form 5-methylcytosine"
caaattctagaggtggagtgaaagtgcatttgtccctgaaagcatcctgtggtaaatcaccgctcttgcatattcagaagtcgtcagtttcataagcagaagcgtgactctgttgggcaact

SEQ ID NO: 24307 - DNA, 122 bp, Homo sapiens
  misc_feature (61)..(62): /note="This region represents a CpG dinucleotide"
  misc_feature (61)..(61): /note="Nucleotide may be methylated to form 5-methylcytosine"
tgtctcaaaaaaaaaatctgtaatatagatttataccacataaagagctaaaagaatacacgaagaggagaggttaattctggcttaaacctagggtgactcagcttcaaagaagaggtaat

SEQ ID NO: 24308 - DNA, 122 bp, Homo sapiens
  misc_feature (61)..(62): /note="This region represents a CpG dinucleotide"
  misc_feature (61)..(61): /note="Nucleotide may be methylated to form 5-methylcytosine"
tgtgtttgtgggtgagtatgtgcatgtgttgtgtatgcagggggtggggaggggcgagagcggtcaaataggaagtgccttggtatttatgttgaagtgcacactggtttaaattacccact

SEQ ID NO: 24309 - DNA, 122 bp, Homo sapiens
  misc_feature (61)..(62): /note="This region represents a CpG dinucleotide"
  misc_feature (61)..(61): /note="Nucleotide may be methylated to form 5-methylcytosine"
atacagacttacaccatgactaaaggttcttttaatctttgttccctatctctgtctttccgtaaaatggtccatctaaattttcttaccttcctaaagtggaatgaggattatctattaaa

SEQ ID NO: 24310 - DNA, 122 bp, Homo sapiens
  misc_feature (61)..(62): /note="This region represents a CpG dinucleotide"
  misc_feature (61)..(61): /note="Nucleotide may be methylated to form 5-methylcytosine"
atacaggatactgaaggcagctctaaagcagggctttcaaaggcatgttgtgtggtgacacgggaaatgaggtgtcatctcccagggcacagcagccatgaagatccgtggacattccttta

SEQ ID NO: 24311 - DNA, 122 bp, Homo sapiens
  misc_feature (61)..(62): /note="This region represents a CpG dinucleotide"
  misc_feature (61)..(61): /note="Nucleotide may be methylated to form 5-methylcytosine"
gatctgaaattgcacatcccaacgatgatttcccctggaagctgacattagccctagcagcgtatgtgactgatggtgcctctgaaagagggactctcaggatcaaatactaagagcttatt

SEQ ID NO: 24312 - DNA, 122 bp, Homo sapiens
  misc_feature (61)..(62): /note="This region represents a CpG dinucleotide"
  misc_feature (61)..(61): /note="Nucleotide may be methylated to form 5-methylcytosine"
cccagttctttttctttggcggggggagagggggcggataagatcattaacataataatgcgtgagctgagtttttgcatatgatcattagcataataatgcttgatctagatggcgcaccc

SEQ ID NO: 24313 - DNA, 122 bp, Homo sapiens
  misc_feature (61)..(62): /note="This region represents a CpG dinucleotide"
  misc_feature (61)..(61): /note="Nucleotide may be methylated to form 5-methylcytosine"
ggctgtgtttagcgcacagcctagtacacgagcatttgttaagtggatgcaagaccatgacgttcatttccttctgaaacaagtgagcaatcatgagtgaggcaatctcatcttttccctca

SEQ ID NO: 24314 - DNA, 122 bp, Homo sapiens
  misc_feature (61)..(62): /note="This region represents a CpG dinucleotide"
  misc_feature (61)..(61): /note="Nucleotide may be methylated to form 5-methylcytosine"
ttaccatgataacccatgaatccattaaccaattaatccatgaatgaattaatccactcacgaaggcagactccttatgacctaatctcctcttcaaggccccaccccttaatactgttaca

SEQ ID NO: 24315 - DNA, 122 bp, Homo sapiens
  misc_feature (61)..(62): /note="This region represents a CpG dinucleotide"
  misc_feature (61)..(61): /note="Nucleotide may be methylated to form 5-methylcytosine"
tcatgaaaagcaggaaagccaggatctcagagctactgcaaaagttccttctccaccagacgagcaccaagaagctgagaatgctgtttcctcaggtaaacgtggaataaatggtatgtcaa

SEQ ID NO: 24316 - DNA, 122 bp, Homo sapiens
  misc_feature (61)..(62): /note="This region represents a CpG dinucleotide"
  misc_feature (61)..(61): /note="Nucleotide may be methylated to form 5-methylcytosine"
aagaccttgaaatgggcacatacacagaaagattactgagcattctgttttatgcaatcacgtgggttatctgattccctgggtatgccacattcattgcctttaagatattttacaactct

SEQ ID NO: 24317 - DNA, 122 bp, Homo sapiens
  misc_feature (61)..(62): /note="This region represents a CpG dinucleotide"
  misc_feature (61)..(61): /note="Nucleotide may be methylated to form 5-methylcytosine"
tgtttccagcttttggctgttaggattgtgcatacatcctggcccacatgtgtacacttccgtccagggtgtgtggatagtcagaagtggaagtgctggatcacaggaggtgcatttcttca

SEQ ID NO: 24318 - DNA, 122 bp, Homo sapiens
  misc_feature (61)..(62): /note="This region represents a CpG dinucleotide"
  misc_feature (61)..(61): /note="Nucleotide may be methylated to form 5-methylcytosine"
ataaccctttactcctgcatctctataccaaaataagtctcccttctgcgccactattcccgacgccagtcagccactgccctcttagaggcaaccacgcttctcagtttcctgtgcctcct

SEQ ID NO: 24319 - DNA, 122 bp, Homo sapiens
  misc_feature (61)..(62): /note="This region represents a CpG dinucleotide"
  misc_feature (61)..(61): /note="Nucleotide may be methylated to form 5-methylcytosine"
cttgcacaggcaggaccaggtcaaaggaagaggacactgatgagggcctggaggctcttacgttgcagattagattaggaaaggccttgaatgccaaactgaggcctacagacttcattacg

SEQ ID NO: 24320 - DNA, 122 bp, Homo sapiens
  misc_feature (61)..(62): /note="This region represents a CpG dinucleotide"
  misc_feature (61)..(61): /note="Nucleotide may be methylated to form 5-methylcytosine"
caaacgggttatgccccatcccctgcttgcttctccagagccacctctcatccccatcctcggcttcagacacgcagttcctcaatcttgcagtgtgtactccaggctttgagcctttccat

SEQ ID NO: 24321 - DNA, 122 bp, Homo sapiens
  misc_feature (61)..(62): /note="This region represents a CpG dinucleotide"
  misc_feature (61)..(61): /note="Nucleotide may be methylated to form 5-methylcytosine"
tatggcgtgtttgatttgcttttctctaaagcactgctctgtaagttcctatggggggggcgggcagagctgctagaaatacagaagcataagagagtaaataatggtaccttcatatgcaa

SEQ ID NO: 24322 - DNA, 122 bp, Homo sapiens
  misc_feature (61)..(62): /note="This region represents a CpG dinucleotide"
  misc_feature (61)..(61): /note="Nucleotide may be methylated to form 5-methylcytosine"
tagccacatagagttgcctaaatatttgagcagaaaccccagcccttctgcagggtctcacgtgaacatcctaccagatgtggggatatcaaggtaaaagacagggcaattcatataataat

SEQ ID NO: 24323 - DNA, 122 bp, Homo sapiens
  misc_feature (61)..(62): /note="This region represents a CpG dinucleotide"
  misc_feature (61)..(61): /note="Nucleotide may be methylated to form 5-methylcytosine"
aaagagaacagtataaaaaggggtgggggaagtaactttacagtggataaatctaacaaacgctactccagaaggatgatcaaggtcagtaataatgtgataagtcaccttgatagtatgta

SEQ ID NO: 24324 - DNA, 122 bp, Homo sapiens
  misc_feature (61)..(62): /note="This region represents a CpG dinucleotide"
  misc_feature (61)..(61): /note="Nucleotide may be methylated to form 5-methylcytosine"
ctgcattgtagaatttctcgccctgcaggttatggaagtggatccttcccaggtgatgtgcgagggaagacacatttactatccttgatggggctgattcctttagtttctctagcagcaga

SEQ ID NO: 24325 - DNA, 122 bp, Homo sapiens
  misc_feature (61)..(62): /note="This region represents a CpG dinucleotide"
  misc_feature (61)..(61): /note="Nucleotide may be methylated to form 5-methylcytosine"
gatagagattcagagtgaaacttgggctctgagtctgtctgcagctgagacacagcctcccgtccctccttagtcccctgtccttcttcctgctttccctcctcttcctgttcctcttcttg

SEQ ID NO: 24326 - DNA, 122 bp, Homo sapiens
  misc_feature (61)..(62): /note="This region represents a CpG dinucleotide"
  misc_feature (61)..(61): /note="Nucleotide may be methylated to form 5-methylcytosine"
ccacacaggccgagttttggtgagaagaggaggaaaggataatatttgggaatttggaaacgaaatttaagagagatctttgagaagcatgagggtgttacttacttgaggagagagaaggt

SEQ ID NO: 24327 - DNA, 122 bp, Homo sapiens
  misc_feature (61)..(62): /note="This region represents a CpG dinucleotide"
  misc_feature (61)..(61): /note="Nucleotide may be methylated to form 5-methylcytosine"
ccacccaacatacctggagtgcaggcgaggtccaggcaaacgggaaagcgacttcttgtacgaatagccatctcaagatgaagccaggctgtggaaaacttaaggccatctagatgggaagg

SEQ ID NO: 24328 - DNA, 122 bp, Homo sapiens
  misc_feature (61)..(62): /note="This region represents a CpG dinucleotide"
  misc_feature (61)..(61): /note="Nucleotide may be methylated to form 5-methylcytosine"
cctgcccgtgaggcgtgtgtgtgcacacgtgcgtgtgcgtgtgtcctccagggcgggctccgggaagggggtgtgcactcacggtaaccttcagtcactgaggaacaaacacagggccctcc

SEQ ID NO: 24329 - DNA, 122 bp, Homo sapiens
  misc_feature (61)..(62): /note="This region represents a CpG dinucleotide"
  misc_feature (61)..(61): /note="Nucleotide may be methylated to form 5-methylcytosine"
taaataaaataagtaaaggaaaataagttgcatgatgtattgcagagatatatcacaccccggcaaatggggaactgaaaccctccagcagaagcacttagcacacttcatttgattcccat

SEQ ID NO: 24330 - DNA, 122 bp, Homo sapiens
  misc_feature (61)..(62): /note="This region represents a CpG dinucleotide"
  misc_feature (61)..(61): /note="Nucleotide may be methylated to form 5-methylcytosine"
gggagtggtggagacgctggacaaagggatgattcacgtcctgggtgggaccgagcgggacggtgggagatttcatcaggctactcagaacagtgtgcaatttaaaacctgttgattgttta

SEQ ID NO: 24331 - DNA, 122 bp, Homo sapiens
  misc_feature (61)..(62): /note="This region represents a CpG dinucleotide"
  misc_feature (61)..(61): /note="Nucleotide may be methylated to form 5-methylcytosine"
ttattatgctgagaaactcagctcaggttccaaaagttcaaactcactacaaatcataaacgtggagctggtcatacctagtctcctcagaagaaagttttaacagtccttgttctctgaat

SEQ ID NO: 24332 - DNA, 122 bp, Homo sapiens
  misc_feature (61)..(62): /note="This region represents a CpG dinucleotide"
  misc_feature (61)..(61): /note="Nucleotide may be methylated to form 5-methylcytosine"
aaaatacagttgtgccagctttagctccctcgcagaatagatgatggcatgacatggatgcggaagcatctggtaatgttttgaactgcacagagctgagtgtcctgaccatcaaagccaga

SEQ ID NO: 24333 - DNA, 122 bp, Homo sapiens
  misc_feature (61)..(62): /note="This region represents a CpG dinucleotide"
  misc_feature (61)..(61): /note="Nucleotide may be methylated to form 5-methylcytosine"
cgatcttgagggcaaatcccattaaatatctgtacccagtctagcatccagagttgtcagcgttcgtgagcaaacagatctcagaggcatcagtgttcgtgagcaaacagatctcagaggcg

SEQ ID NO: 24334 - DNA, 122 bp, Homo sapiens
  misc_feature (61)..(62): /note="This region represents a CpG dinucleotide"
  misc_feature (61)..(61): /note="Nucleotide may be methylated to form 5-methylcytosine"
tacctgcaagactatacgttttctcctgatttcttgttctgttagttagacacaacctatcgtgaccccataccttgtaaggtgaagaaggcccttaatccctcccccctttctcttcctta

SEQ ID NO: 24335 - DNA, 122 bp, Homo sapiens
  misc_feature (61)..(62): /note="This region represents a CpG dinucleotide"
  misc_feature (61)..(61): /note="Nucleotide may be methylated to form 5-methylcytosine"
ggtggtttttatagtttcaggtgttacatttgtctttaatccattttgtgttgattgttgcgtaagaggtgagacaaagatctattttcattgttctgtttgtgaatatccagttttcccaa

SEQ ID NO: 24336 - DNA, 122 bp, Homo sapiens
  misc_feature (61)..(62): /note="This region represents a CpG dinucleotide"
  misc_feature (61)..(61): /note="Nucleotide may be methylated to form 5-methylcytosine"
ccctgagacacataagattgcagttccgaggcctagacttacttaacagtggcctccttacgtttcccagggcttcatgataaagatgcctgttctagctgtggtttctgctttgtattgtc

SEQ ID NO: 24337 - DNA, 122 bp, Homo sapiens
  misc_feature (61)..(62): /note="This region represents a CpG dinucleotide"
  misc_feature (61)..(61): /note="Nucleotide may be methylated to form 5-methylcytosine"
gtaggccacacctacttttggaggccattgtttcacaataattggttggttgatttgtcccggctgacctgaatgtctgcctggctttctgtctttagacttctcttatgctcactttcctt

SEQ ID NO: 24338 - DNA, 122 bp, Homo sapiens
  misc_feature (61)..(62): /note="This region represents a CpG dinucleotide"
  misc_feature (61)..(61): /note="Nucleotide may be methylated to form 5-methylcytosine"
tatgacacttcctgttctgtgtcataaattccatgtcataatttcccctttaccgtatctcgcattataatgctatcaccacaaagacaagaccacttctatcttgttcacattattttcct

SEQ ID NO: 24339 - DNA, 122 bp, Homo sapiens
  misc_feature (61)..(62): /note="This region represents a CpG dinucleotide"
  misc_feature (61)..(61): /note="Nucleotide may be methylated to form 5-methylcytosine"
aggataaaagaaagatgtaagtttttttctctcgccctgctctgcttatcacagaagctccgtatcaagatgacagagctcagcctggtactggtacaaaaacagactcatagaccaatgga

SEQ ID NO: 24340 - DNA, 122 bp, Homo sapiens
  misc_feature (61)..(62): /note="This region represents a CpG dinucleotide"
  misc_feature (61)..(61): /note="Nucleotide may be methylated to form 5-methylcytosine"
agctgcatttaagtggactgtctcccagtgacagaggcgggcggctgcacttagctgtgccgtgggcttactcacagggggtggagacaagatgacatcacaccctttcccacacacaccaa

SEQ ID NO: 24341 - DNA, 122 bp, Homo sapiens
  misc_feature (61)..(62): /note="This region represents a CpG dinucleotide"
  misc_feature (61)..(61): /note="Nucleotide may be methylated to form 5-methylcytosine"
tagtttccagttgcaagatgcttaaatctgaacaagctgttccactgtcctgcacccccacggcatgggtcatgatgaaccacctacaaagagagcaacgatagtaatggcaaaacaatatt

SEQ ID NO: 24342 - DNA, 122 bp, Homo sapiens
  misc_feature (61)..(62): /note="This region represents a CpG dinucleotide"
  misc_feature (61)..(61): /note="Nucleotide may be methylated to form 5-methylcytosine"
gaatcattactttttcaacagaaatgccattttcatgattggcatttctaaatccttcagcgtcagagaagattctagaacttctcatttgtggctagtttcagggtagaacagctcttctt

SEQ ID NO: 24343 - DNA, 122 bp, Homo sapiens
  misc_feature (61)..(62): /note="This region represents a CpG dinucleotide"
  misc_feature (61)..(61): /note="Nucleotide may be methylated to form 5-methylcytosine"
ggaaaacgtgatacttgcaagagtttaaaacaacttgtaacaactggcagtgaggcggggcgcgtggagagagcaggataccaaaaaagctgtgtgtggcaatgcggggtggaggctgacct

SEQ ID NO: 24344 - DNA, 122 bp, Homo sapiens
  misc_feature (61)..(62): /note="This region represents a CpG dinucleotide"
  misc_feature (61)..(61): /note="Nucleotide may be methylated to form 5-methylcytosine"
caggagtccaccctcttttccattcacatcctgcagaaggaactactgagtcacaaagtacgtgaataaagttgccaaggccatggctcagttctaagctggatggaaacgctttggaaact

SEQ ID NO: 24345 - DNA, 122 bp, Homo sapiens
  misc_feature (61)..(62): /note="This region represents a CpG dinucleotide"
  misc_feature (61)..(61): /note="Nucleotide may be methylated to form 5-methylcytosine"
ggcagtggaacatgcaaggcactgactgagcatgcaggatcagctccatctcattatgtacgtagatagaggtggagacaggaaaaagactaagccagacgtggtggctcacacctgtaatc

SEQ ID NO: 24346 - DNA, 122 bp, Homo sapiens
  misc_feature (61)..(62): /note="This region represents a CpG dinucleotide"
  misc_feature (61)..(61): /note="Nucleotide may be methylated to form 5-methylcytosine"
actgtgccaggcggccagctaggtctagaaccagaggactctgaaagagctgatcctggacggaagcaaaggatgtggctccaaacaagctccaaaccaatctagacaagagtcctcaaaca

SEQ ID NO: 24347 - DNA, 122 bp, Homo sapiens
  misc_feature (61)..(62): /note="This region represents a CpG dinucleotide"
  misc_feature (61)..(61): /note="Nucleotide may be methylated to form 5-methylcytosine"
taggaactcttccctggggttagctttctggaattaacaactgatattacagcaccctcccgttattgagtctccccacagccctgccaggtgcgtgtcttcattcccgtttcctagactgg

SEQ ID NO: 24348 - DNA, 122 bp, Homo sapiens
  misc_feature (61)..(62): /note="This region represents a CpG dinucleotide"
  misc_feature (61)..(61): /note="Nucleotide may be methylated to form 5-methylcytosine"
cctggctagaacagagagctgggctgaagtgaaataggatatgtagtgtgacaggtgtagcggagcccgattatgaagcatttcaacgtgatgtaacaggaaacagtgccttagtttttgat

SEQ ID NO: 24349 - DNA, 122 bp, Homo sapiens
  misc_feature (61)..(62): /note="This region represents a CpG dinucleotide"
  misc_feature (61)..(61): /note="Nucleotide may be methylated to form 5-methylcytosine"
gtcagagtagtgggtcctgagaatgccaggcgacggagcctggggcgagagggagctacccgcccgggcctgattttgttatttggaggaagtaggataaacgctgttttgccttatataat

SEQ ID NO: 24350 - DNA, 122 bp, Homo sapiens
  misc_feature (61)..(62): /note="This region represents a CpG dinucleotide"
  misc_feature (61)..(61): /note="Nucleotide may be methylated to form 5-methylcytosine"
cccttaataaccatcgccctggcaggagaggggtgccgaattccgtctcctgcgtgcctgcgtgtgtaatgtgccgagcaagtgatcctaatgatgcattcagcacaccactccccaaagac

SEQ ID NO: 24351 - DNA, 122 bp, Homo sapiens
  misc_feature (61)..(62): /note="This region represents a CpG dinucleotide"
  misc_feature (61)..(61): /note="Nucleotide may be methylated to form 5-methylcytosine"
cagagagtccccacccgaatcctcctttattttaaatctgtgaagctcatgtctgcaaaacgcacccccgatcccccagcctaagctctgaaaatgctgtgggagaaggggctctgcttcga

SEQ ID NO: 24352 - DNA, 122 bp, Homo sapiens
  misc_feature (61)..(62): /note="This region represents a CpG dinucleotide"
  misc_feature (61)..(61): /note="Nucleotide may be methylated to form 5-methylcytosine"
agaccatttgtgtgtcttcagtctcagtgactttatgctctgggttcagcacttgagcttcgctcttatcaaaagctggcaccattaaagggcattcatcatcaataagacaataggacact

SEQ ID NO: 24353 - DNA, 122 bp, Homo sapiens
  misc_feature (61)..(62): /note="This region represents a CpG dinucleotide"
  misc_feature (61)..(61): /note="Nucleotide may be methylated to form 5-methylcytosine"
taattctctttggcttaattttaatgccacagacttatctgtgcattccctttgttctatcgtggcttagttctaaggtgagaagaagaatctaggtaaggattgactaaagaaaatgacac

SEQ ID NO: 24354 - DNA, 122 bp, Homo sapiens
  misc_feature (61)..(62): /note="This region represents a CpG dinucleotide"
  misc_feature (61)..(61): /note="Nucleotide may be methylated to form 5-methylcytosine"
ctgtcatgacacctgtaggactcaatacatggaacgcagagtaggttcactgggcaacagcgggagacagaggtaagaggtaggctgaggccgtgtcgtcgggagctggtgtgggcgggtca

SEQ ID NO: 24355 - DNA, 122 bp, Homo sapiens
  misc_feature (61)..(62): /note="This region represents a CpG dinucleotide"
  misc_feature (61)..(61): /note="Nucleotide may be methylated to form 5-methylcytosine"
ttagaggatggggcgaggggctggttcactctgacctcatcacattcttggacgggggagcggaagcctggtgagccatccccaggtccagcctcctgaagcctgctgctgtgatttgtggg

SEQ ID NO: 24356 - DNA, 122 bp, Homo sapiens
  misc_feature (61)..(62): /note="This region represents a CpG dinucleotide"
  misc_feature (61)..(61): /note="Nucleotide may be methylated to form 5-methylcytosine"
ctttaccaggtttctaagcaaaaatttctaaaaatgattaattgttctgacagaattaggcgtagttctttatcaacatttatggattccatgccacaagtagtatgcgcttaagtgcagag

SEQ ID NO: 24357 - DNA, 122 bp, Homo sapiens
  misc_feature (61)..(62): /note="This region represents a CpG dinucleotide"
  misc_feature (61)..(61): /note="Nucleotide may be methylated to form 5-methylcytosine"
aaccagtctcctctctcaaaccaaaatggcctatttctaattcagataaaaccgtgacttcgaaagaccattgctgcaggcttcttattgacccctgactgtgattttatgattaaaacaaa

SEQ ID NO: 24358 - DNA, 122 bp, Homo sapiens
  misc_feature (61)..(62): /note="This region represents a CpG dinucleotide"
  misc_feature (61)..(61): /note="Nucleotide may be methylated to form 5-methylcytosine"
ggcccatgcggggaagtagcgtccttggtcccttgctgagggcctgtggctaggagctgtcgtcttctgggctggctcctgttttaagtgaggctgtgtctcacaaacagacaagcgcccct

SEQ ID NO: 24359 - DNA, 122 bp, Homo sapiens
  misc_feature (61)..(62): /note="This region represents a CpG dinucleotide"
  misc_feature (61)..(61): /note="Nucleotide may be methylated to form 5-methylcytosine"
tatgatagaactaacactttgtgagtcatctgggatcctccctgcagagactgagtctctcgctacctgcctgctccctttccccacccattcaacttcattcatctttcaagtttcacagc

SEQ ID NO: 24360 - DNA, 122 bp, Homo sapiens
  misc_feature (61)..(62): /note="This region represents a CpG dinucleotide"
  misc_feature (61)..(61): /note="Nucleotide may be methylated to form 5-methylcytosine"
aagagggatgccctgtgtgcatctgcccgcactgcgagtccttgccactccttagatcaacggagccagagatcttgccaccaacacactggcaaagcagctggtttgtctacactttctgt

SEQ ID NO: 24361 - DNA, 122 bp, Homo sapiens
  misc_feature (61)..(62): /note="This region represents a CpG dinucleotide"
  misc_feature (61)..(61): /note="Nucleotide may be methylated to form 5-methylcytosine"
agtcaaaacagaagccgagctgtgcactcaggaggcaggcagccccttgttttggactatcgtctatcacttactcgctgggtggcttaaaggaagttactcaacatctctgagccatttcc

SEQ ID NO: 24362 - DNA, 122 bp, Homo sapiens
  misc_feature (61)..(62): /note="This region represents a CpG dinucleotide"
  misc_feature (61)..(61): /note="Nucleotide may be methylated to form 5-methylcytosine"
gaatctgcttggcagccgagggcggtgacgttcctgtagcttccgtggggaattcaggtgcgtgtgtgtgcgcgtgtgtgtgcgtgtgtgtgataagctgttttcattttaccatcctaaaa

SEQ ID NO: 24363 - DNA, 122 bp, Homo sapiens
  misc_feature (61)..(62): /note="This region represents a CpG dinucleotide"
  misc_feature (61)..(61): /note="Nucleotide may be methylated to form 5-methylcytosine"
acatgggtgaatgcaattgctaaactcaataaactgtactcttcacatctgtgcattttgcgtactgtaattatcctctcaggaacagccacttcataattgttggctttaaataaaattgc

SEQ ID NO: 24364 - DNA, 122 bp, Homo sapiens
  misc_feature (61)..(62): /note="This region represents a CpG dinucleotide"
  misc_feature (61)..(61): /note="Nucleotide may be methylated to form 5-methylcytosine"
ggtttgcacagaaagacaatttcaaggacttatcttgaatacaacaaagggcaaccttgccgtaaatacatttaattatctgtcaatccctccagttctcttctactaaattgtgtgtgact

SEQ ID NO: 24365 - DNA, 122 bp, Homo sapiens
  misc_feature (61)..(62): /note="This region represents a CpG dinucleotide"
  misc_feature (61)..(61): /note="Nucleotide may be methylated to form 5-methylcytosine"
gaggccattgaccagggtaaagtagtatcccatgaaaggcacactgtaaatactcatgaccgcctttcctgtagccccatcagggcaggactagaatttataacccctctccagggagagcc

SEQ ID NO: 24366 - DNA, 122 bp, Homo sapiens
  misc_feature (61)..(62): /note="This region represents a CpG dinucleotide"
  misc_feature (61)..(61): /note="Nucleotide may be methylated to form 5-methylcytosine"
tacacttataatgaatctctgtgaccttttaaaaaagatgtatttgttttgctcaaattgcgtatggaattgtgaattggaatggtacttaatcttttcggttgcaaacctttctcaagaca

SEQ ID NO: 24367 - DNA, 122 bp, Homo sapiens
  misc_feature (61)..(62): /note="This region represents a CpG dinucleotide"
  misc_feature (61)..(61): /note="Nucleotide may be methylated to form 5-methylcytosine"
caaggttttaccatgttggtcaggcagttcttgtactctggacttcaagtgatccgcccacgtcggcatctgaaagtgctgggattacaggagtgagtcaccgtacccagctagcagttgtt

SEQ ID NO: 24368 - DNA, 122 bp, Homo sapiens
  misc_feature (61)..(62): /note="This region represents a CpG dinucleotide"
  misc_feature (61)..(61): /note="Nucleotide may be methylated to form 5-methylcytosine"
tgttgcccagctgacctgtcaagttgtggttggagacccagagtgacccagcccctacatcgcccatcagacttgttgccctggtctggctggccatttatctggctctgggattaactcta

SEQ ID NO: 24369 - DNA, 122 bp, Homo sapiens
  misc_feature (61)..(62): /note="This region represents a CpG dinucleotide"
  misc_feature (61)..(61): /note="Nucleotide may be methylated to form 5-methylcytosine"
aaactgtaatatcattgaatccttgaatctcaaattttagagactgatttctctggagtgcgtgcaaccctggctaagcaactgtttctaaagcacagccctctttggaaagggagacacag

SEQ ID NO: 24370 - DNA, 122 bp, Homo sapiens
  misc_feature (61)..(62): /note="This region represents a CpG dinucleotide"
  misc_feature (61)..(61): /note="Nucleotide may be methylated to form 5-methylcytosine"
ataaaccacagtttttcctttgaacagtcaagcggcaggcagctgttatcattcatctcgcgtgaactgaatccaatctcatctaaccatgctgaaccacaaaccacagtatggccttgtct

SEQ ID NO: 24371 - DNA, 122 bp, Homo sapiens
  misc_feature (61)..(62): /note="This region represents a CpG dinucleotide"
  misc_feature (61)..(61): /note="Nucleotide may be methylated to form 5-methylcytosine"
ctagtctggggcggggacttgggagcgcctaaaacttgcgaggagggcggggccgcagaccggtcctttaaaggttggaagtggccccgaggcgccggcagccctgggcggtcccgggaatc

SEQ ID NO: 24372 - DNA, 122 bp, Homo sapiens
  misc_feature (61)..(62): /note="This region represents a CpG dinucleotide"
  misc_feature (61)..(61): /note="Nucleotide may be methylated to form 5-methylcytosine"
aagaactgagctccaaaacacacaccgtcaactccatctatccccagacctctggattaccggtcagtctgagtcagacccagacctctggattaccggtcagtctgagtcagcggagaggc

SEQ ID NO: 24373 - DNA, 122 bp, Homo sapiens
  misc_feature (61)..(62): /note="This region represents a CpG dinucleotide"
  misc_feature (61)..(61): /note="Nucleotide may be methylated to form 5-methylcytosine"
gccagatgcaaagccccttttatgtgctgtaggtccatgaggctgttctgccaatatgttcgtctgtggatgaggaaacaggcctgggagaatgctacttgcccaaggccacccagttggct

SEQ ID NO: 24374 - DNA, 122 bp, Homo sapiens
  misc_feature (61)..(62): /note="This region represents a CpG dinucleotide"
  misc_feature (61)..(61): /note="Nucleotide may be methylated to form 5-methylcytosine"
tgtgggacgcggccgcgtcccatcacccaccttgggcacaaggctgcccttctggtgccacgtcccaggctgatggccccggtgtccaactgccttagcatccttgtctgtgaataacaagt

SEQ ID NO: 24375 - DNA, 122 bp, Homo sapiens
  misc_feature (61)..(62): /note="This region represents a CpG dinucleotide"
  misc_feature (61)..(61): /note="Nucleotide may be methylated to form 5-methylcytosine"
gcagcatccctcatgctaaatggtgacacttctcagtgacaatcagcctgaaggaggtgacgcccagcttgccggccgtgggtgtgcccctaggctgtgccacgaggcaccctgaaaagcag

SEQ ID NO: 24376 - DNA, 122 bp, Homo sapiens
  misc_feature (61)..(62): /note="This region represents a CpG dinucleotide"
  misc_feature (61)..(61): /note="Nucleotide may be methylated to form 5-methylcytosine"
tgtgtgtgtgtgtgtgtgtgtgtcagaggtcagccctgatgtaattgccaccgaggtcaccgtggatgaggtcattgtgggtgaggttacagtgcaagagctgtcttttggtgctgttctgg

SEQ ID NO: 24377 - DNA, 122 bp, Homo sapiens
  misc_feature (61)..(62): /note="This region represents a CpG dinucleotide"
  misc_feature (61)..(61): /note="Nucleotide may be methylated to form 5-methylcytosine"
accatcaccactgtccatttcctgaatgtttttcatcttgcaaacctgaaactctatatccgttaaacagcaacttcctatcctctcttcctcccagccctggtaaccactgttctactttc

SEQ ID NO: 24378 - DNA, 122 bp, Homo sapiens
  misc_feature (61)..(62): /note="This region represents a CpG dinucleotide"
  misc_feature (61)..(61): /note="Nucleotide may be methylated to form 5-methylcytosine"
catttgtcagagaaagtttctcaagcagtccctgtgatcttcagaacccagcttgttcttcgcccagaatgctttagttgtaggcaaatttgggggctgaattaacttcccagccgctagga

SEQ ID NO: 24379 - DNA, 122 bp, Homo sapiens
  misc_feature (61)..(62): /note="This region represents a CpG dinucleotide"
  misc_feature (61)..(61): /note="Nucleotide may be methylated to form 5-methylcytosine"
ttcagccttgtgacacactgagcagagaacccagtcatgatgggctgggcttctgacttacgaaactgtgagctagtagatgcctgttgcctaagccactaagtttgtggtaatttgttatg

SEQ ID NO: 24380 - DNA, 122 bp, Homo sapiens
  misc_feature (61)..(62): /note="This region represents a CpG dinucleotide"
  misc_feature (61)..(61): /note="Nucleotide may be methylated to form 5-methylcytosine"
ccttgggctgaagggctcaaaccccaggctgctacttcccttgagaattgctcacccaggcgggagggctgctccttccacacagcacagcctgtaaacgtcactctctgtcatcgtttata

SEQ ID NO: 24381 - DNA, 122 bp, Homo sapiens
  misc_feature (61)..(62): /note="This region represents a CpG dinucleotide"
  misc_feature (61)..(61): /note="Nucleotide may be methylated to form 5-methylcytosine"
aatttcctttaagaacttttcctttctggtcacaacttggctaactgtgtggcacaatttcgatatgccttccttgctcagcttaatcatttctagcttttgattaaaagtgaaaaatgtac

SEQ ID NO: 24382 - DNA, 122 bp, Homo sapiens
  misc_feature (61)..(62): /note="This region represents a CpG dinucleotide"
  misc_feature (61)..(61): /note="Nucleotide may be methylated to form 5-methylcytosine"
gtattgagatttaaaatcaacaaccatttattaagtccctaccgtgagtcagtctacatacgttagatgcctccatgtgcccggcctgaaggtggtggtgagagagtttttttctggactaa

SEQ ID NO: 24383 - DNA, 122 bp, Homo sapiens
  misc_feature (61)..(62): /note="This region represents a CpG dinucleotide"
  misc_feature (61)..(61): /note="Nucleotide may be methylated to form 5-methylcytosine"
taaataaatgatttaacatgctcaggcttctaagtgcccatccccggggctgcggaggagcgaggtgcttaaaccgttcccaagcctcaggcattgaaagcaggagtgttttctctaagaag

SEQ ID NO: 24384 - DNA, 122 bp, Homo sapiens
  misc_feature (61)..(62): /note="This region represents a CpG dinucleotide"
  misc_feature (61)..(61): /note="Nucleotide may be methylated to form 5-methylcytosine"
gggtgaagggatttggagactcaggtcatgcatgaccttgccccacctgtggcttcaatgcgatgtggctttgagtacaaagtgaaaaggctgacctgaaccaccggttcccaaagcgggtt

SEQ ID NO: 24385 - DNA, 122 bp, Homo sapiens
  misc_feature (61)..(62): /note="This region represents a CpG dinucleotide"
  misc_feature (61)..(61): /note="Nucleotide may be methylated to form 5-methylcytosine"
aaatagctcagagtcctacaacaacaaaagtcttatgttaggtgtcatctgccaatcagccgcaggtttctttgtttttattctgggatccaggccaaaggaggagtccccatcgtggttat

SEQ ID NO: 24386 - DNA, 122 bp, Homo sapiens
  misc_feature (61)..(62): /note="This region represents a CpG dinucleotide"
  misc_feature (61)..(61): /note="Nucleotide may be methylated to form 5-methylcytosine"
gggacaggacctgggttggggccagcaagggtgacaccccaagtggaaactgagttaccccgtgaagaagacgagttctatttatggtcagaatgccacgctcaagggccagtgaaggcctg

SEQ ID NO: 24387 - DNA, 122 bp, Homo sapiens
  misc_feature (61)..(62): /note="This region represents a CpG dinucleotide"
  misc_feature (61)..(61): /note="Nucleotide may be methylated to form 5-methylcytosine"
ggttgtcgtgtttacagtttttttccacatcacgagttcaggacatgataacataataaacgaggttttctacaaagccaaggatctgaatgacaaaggaaggacaactagagattagggat

SEQ ID NO: 24388 - DNA, 122 bp, Homo sapiens
  misc_feature (61)..(62): /note="This region represents a CpG dinucleotide"
  misc_feature (61)..(61): /note="Nucleotide may be methylated to form 5-methylcytosine"
gaaatcttgccctacattgttatgcagcactactgcgaagctggcacacctttctgcttgcgctgcctctagcacctcacccagcaactaacccagtttagtcagaccttccaacgttaagg

SEQ ID NO: 24389 - DNA, 122 bp, Homo sapiens
  misc_feature (61)..(62): /note="This region represents a CpG dinucleotide"
  misc_feature (61)..(61): /note="Nucleotide may be methylated to form 5-methylcytosine"
tgctgcctatttcacatagctgttgttgagtctccagtacaataaggaattcaggctgggcgcagtggctcacgcctgtaatcccagcactttgggaggctgaggcgggtgaatcacctgag

SEQ ID NO: 24390 - DNA, 122 bp, Homo sapiens
  misc_feature (61)..(62): /note="This region represents a CpG dinucleotide"
  misc_feature (61)..(61): /note="Nucleotide may be methylated to form 5-methylcytosine"
acatataacatcttgacctaaagcagccttcattgtccctgaaacttgtcgagtgatttccgcaacagcccagcctgcctaaccccaaattctttcaacaaattcattcttcccttccatga

SEQ ID NO: 24391 - DNA, 122 bp, Homo sapiens
  misc_feature (61)..(62): /note="This region represents a CpG dinucleotide"
  misc_feature (61)..(61): /note="Nucleotide may be methylated to form 5-methylcytosine"
ctctgtctgctcattgggatcacctgagagctttgaaaaagtactactgttcaggttccacgtccagaatgttgatttaatcacgctgggtcagatctcaggtatgttgatctttacaaaac

SEQ ID NO: 24392 - DNA, 122 bp, Homo sapiens
  misc_feature (61)..(62): /note="This region represents a CpG dinucleotide"
  misc_feature (61)..(61): /note="Nucleotide may be methylated to form 5-methylcytosine"
gcctggccttgtttaaacacaaaacagagtcagcccccaacacagggctgcagaagcaggcggcagcagcattgggtggacacagccatcctaatggtgtttgtttttcccctgtgtaaact

SEQ ID NO: 24393 - DNA, 122 bp, Homo sapiens
  misc_feature (61)..(62): /note="This region represents a CpG dinucleotide"
  misc_feature (61)..(61): /note="Nucleotide may be methylated to form 5-methylcytosine"
atgccttgggtttcttaggagagctcctgctggggccaagaatcatggccagttgctacacgcactgggaggagccatgtcagttgagtctctggccagccctcccacccatctgctcccct

SEQ ID NO: 24394 - DNA, 122 bp, Homo sapiens
  misc_feature (61)..(62): /note="This region represents a CpG dinucleotide"
  misc_feature (61)..(61): /note="Nucleotide may be methylated to form 5-methylcytosine"
ggctgctcagtaaaaggagtaattgtgaaatagagctgttgtgaaataaagcataaggaacggtaaagaatgactaaaactgaaaagaggctgttgggtttcgaaattaagagatacttggt

SEQ ID NO: 24395 - DNA, 122 bp, Homo sapiens
  misc_feature (61)..(62): /note="This region represents a CpG dinucleotide"
  misc_feature (61)..(61): /note="Nucleotide may be methylated to form 5-methylcytosine"
tactgtaatgtgtgtcacctggaattatggagctcaattaacagattatgggtttgtctccgcagcaaggctgggagctccaggaccacaggaagcaggtcttactcatttcctaactcagg

SEQ ID NO: 24396 - DNA, 122 bp, Homo sapiens
  misc_feature (61)..(62): /note="This region represents a CpG dinucleotide"
  misc_feature (61)..(61): /note="Nucleotide may be methylated to form 5-methylcytosine"
gaaagggagaggggctggagattgagctaataatccatcacgcgtaagtaatgaagcctccgtaaaaatccctgaactacaggatccagagagcttctgggctggtggacacatccgcatgc

SEQ ID NO: 24397 - DNA, 122 bp, Homo sapiens
  misc_feature (61)..(62): /note="This region represents a CpG dinucleotide"
  misc_feature (61)..(61): /note="Nucleotide may be methylated to form 5-methylcytosine"
gagaagggcaggggtaagggtgctgtcgcagcagttactggggtagtgatcctggagtctcgaataactcaggctctttaaatcctagaactctgatgaatcacccatgctatgggctcggt

SEQ ID NO: 24398 - DNA, 122 bp, Homo sapiens
  misc_feature (61)..(62): /note="This region represents a CpG dinucleotide"
  misc_feature (61)..(61): /note="Nucleotide may be methylated to form 5-methylcytosine"
atttgttgcaaggatgtttaccgcagggataaatataaaagtgaaggctgaaaacactctcgtggcttagtaacacactgttagagaatgctgtgtacttattaaaaatagtgtttacaaat

SEQ ID NO: 24399 - DNA, 122 bp, Homo sapiens
  misc_feature (61)..(62): /note="This region represents a CpG dinucleotide"
  misc_feature (61)..(61): /note="Nucleotide may be methylated to form 5-methylcytosine"
ttgttttttttcttttgttacggacacccatcatgtatggctcctcatctgagccatcaccgctcccgaaacacatggggcggcagctgctgtgcctccttctcaattcttccaccccccca

SEQ ID NO: 24400 - DNA, 122 bp, Homo sapiens
  misc_feature (61)..(62): /note="This region represents a CpG dinucleotide"
  misc_feature (61)..(61): /note="Nucleotide may be methylated to form 5-methylcytosine"
cactcccaggctttgtaggacaagccaccctgatcatcatcctctctgtgtgtaagacagcgtagaatggcacttgggccatccatgggaaccataaaaggcaaagaaaagaaaatagaaaa

SEQ ID NO: 24401 - DNA, 122 bp, Homo sapiens
  misc_feature (61)..(62): /note="This region represents a CpG dinucleotide"
  misc_feature (61)..(61): /note="Nucleotide may be methylated to form 5-methylcytosine"
tatcagattgaaacaacatggtatagtatatttaagggtgggttccatacgagtttcagacgtctaccgggcaccttggaatgtatcccccagagatatgggagggctagtgaactacctgg

SEQ ID NO: 24402 - DNA, 122 bp, Homo sapiens
  misc_feature (61)..(62): /note="This region represents a CpG dinucleotide"
  misc_feature (61)..(61): /note="Nucleotide may be methylated to form 5-methylcytosine"
gagcctctcgtttcctcatttgtaatatgtgatcagaaatctgtcattctcggcctgccgcggtggctcactgctataatcccagcattttgggaggccaaggcaggcagatcacttgaggt

SEQ ID NO: 24403 - DNA, 122 bp, Homo sapiens
  misc_feature (61)..(62): /note="This region represents a CpG dinucleotide"
  misc_feature (61)..(61): /note="Nucleotide may be methylated to form 5-methylcytosine"
aatctcattttaagccttctaataacttatgactccagttttgtcctccaaattcaactacgttattcattaattccacaaacaatggctgagattatactctgtatcaggcagtgttctag

SEQ ID NO: 24404 - DNA, 122 bp, Homo sapiens
  misc_feature (61)..(62): /note="This region represents a CpG dinucleotide"
  misc_feature (61)..(61): /note="Nucleotide may be methylated to form 5-methylcytosine"
ctaccttatgatgaccagttctttattgcccagtggccattcatgtttcatgtgtgccaacgtgtggcagtaacgccggctgaaatttacttagtaccctatctcagaagagatcaaagtac

SEQ ID NO: 24405 - DNA, 122 bp, Homo sapiens
  misc_feature (61)..(62): /note="This region represents a CpG dinucleotide"
  misc_feature (61)..(61): /note="Nucleotide may be methylated to form 5-methylcytosine"
cagttacacatctctttccgccctgccttccccgaggtgctggctttcacttgtcagtgacggtcattctgaggctgagatgtaagagatacgaagtacctgtccttaccccacccctaatg

SEQ ID NO: 24406 - DNA, 122 bp, Homo sapiens
  misc_feature (61)..(62): /note="This region represents a CpG dinucleotide"
  misc_feature (61)..(61): /note="Nucleotide may be methylated to form 5-methylcytosine"
tcatctcaagagaagcctgcccagaccatacatctagtgctcgtggaaacagagatgttgcgccagatgagaggcctcatcctggattaaacaggctttgataagatcaatgtaaaaatgca

SEQ ID NO: 24407 - DNA, 122 bp, Homo sapiens
  misc_feature (61)..(62): /note="This region represents a CpG dinucleotide"
  misc_feature (61)..(61): /note="Nucleotide may be methylated to form 5-methylcytosine"
tgaaagccctgccctgatgtgtagtatttgctgatttctgtgatgtaaattctcccaccacgacgtatttcaagttaccaatgcgaggccacagaatgcaatgttggaaagagaagtacatc

SEQ ID NO: 24408 - DNA, 122 bp, Homo sapiens
  misc_feature (61)..(62): /note="This region represents a CpG dinucleotide"
  misc_feature (61)..(61): /note="Nucleotide may be methylated to form 5-methylcytosine"
ccaattgccctctaggaagttctgtcaacaaacttgaaatacacactgctttgcagatggcgtcacacttgaggtttgttcctcatgctcattattaaatgtagtgaaacattcctttgact

SEQ ID NO: 24409 - DNA, 122 bp, Homo sapiens
  misc_feature (61)..(62): /note="This region represents a CpG dinucleotide"
  misc_feature (61)..(61): /note="Nucleotide may be methylated to form 5-methylcytosine"
aacaagcatttctttctacctgtcattgaagtgaatcatcagtataagtagcgagctgggcgcattccttctcagttgtgttaaaacttgctggtattcccccggtatcagcagaggtgtgt

SEQ ID NO: 24410 - DNA, 122 bp, Homo sapiens
  misc_feature (61)..(62): /note="This region represents a CpG dinucleotide"
  misc_feature (61)..(61): /note="Nucleotide may be methylated to form 5-methylcytosine"
cactcaataaataacttgaataaatgaatgaatagcattgtcacaaagagctttcttacacggccctgaaatggattccctggcataggttctacctactgttactggttctgcttgagatc

SEQ ID NO: 24411 - DNA, 122 bp, Homo sapiens
  misc_feature (61)..(62): /note="This region represents a CpG dinucleotide"
  misc_feature (61)..(61): /note="Nucleotide may be methylated to form 5-methylcytosine"
tgagagatctattgggcattcttttctaggtggaggtaatagaggcataaggtgaaagttcgaaagcattgtgtcctcagattgacatcagggtatatgtgagaaagataggcatggattat

SEQ ID NO: 24412 - DNA, 122 bp, Homo sapiens
  misc_feature (61)..(62): /note="This region represents a CpG dinucleotide"
  misc_feature (61)..(61): /note="Nucleotide may be methylated to form 5-methylcytosine"
cagctcctacattacactcccttggcaggtacagtctcttatcacaagtgggaagataagcgtgaccagttcacttcccagctcgtgaggcttcacaggctattggttgcctccagaataca

SEQ ID NO: 24413 - DNA, 122 bp, Homo sapiens
  misc_feature (61)..(62): /note="This region represents a CpG dinucleotide"
  misc_feature (61)..(61): /note="Nucleotide may be methylated to form 5-methylcytosine"
aggcgtgagccaccgcgcctgtccagatgtttgggttagaggtcctcaaaaccactcccacgtatgatgattcactaggaggattcacaggactcagcatatagttatactcatggctaagg

SEQ ID NO: 24414 - DNA, 122 bp, Homo sapiens
  misc_feature (61)..(62): /note="This region represents a CpG dinucleotide"
  misc_feature (61)..(61): /note="Nucleotide may be methylated to form 5-methylcytosine"
tgctgacaccatctccaccttctcctggagctttctctgatcagaggctagagctcaacacgttcctaggctttctgatgcgggaactggagctgaagctaattgtaagcagacttttggaa

SEQ ID NO: 24415 - DNA, 122 bp, Homo sapiens
  misc_feature (61)..(62): /note="This region represents a CpG dinucleotide"
  misc_feature (61)..(61): /note="Nucleotide may be methylated to form 5-methylcytosine"
tgaatttaaagaaccactggcaagtgccacgtcctctgtgtttgagttctaaagatagtccgttgagcacactgcttaccttctagtaatttctcgctgaatggacattagaagccattata

SEQ ID NO: 24416 - DNA, 122 bp, Homo sapiens
  misc_feature (61)..(62): /note="This region represents a CpG dinucleotide"
  misc_feature (61)..(61): /note="Nucleotide may be methylated to form 5-methylcytosine"
actgttcataaatatcctctcctttaatatccatggcatgactcaggtaggtactgtactcgccctcattcagctgacaaaggaaccgaggcacagagaaagtaagtaacctgcctaaaggc

SEQ ID NO: 24417 - DNA, 122 bp, Homo sapiens
  misc_feature (61)..(62): /note="This region represents a CpG dinucleotide"
  misc_feature (61)..(61): /note="Nucleotide may be methylated to form 5-methylcytosine"
ttaacataaaaaaatagctctcttattccagttccttataagattccaaatatattatcacgtttatataccaaatggataacaatgactcacagttagttcacaagcagcaaatgtagagg

SEQ ID NO: 24418 - DNA, 122 bp, Homo sapiens
  misc_feature (61)..(62): /note="This region represents a CpG dinucleotide"
  misc_feature (61)..(61): /note="Nucleotide may be methylated to form 5-methylcytosine"
ctcaggtgatccacccgcctcggcctcccaaagtgctgggattacaggcatgagccactgcgcccggccgtagtcaacagtttagagtcaacagccccagctgtcactcacaagtgtcattc

SEQ ID NO: 24419 - DNA, 122 bp, Homo sapiens
  misc_feature (61)..(62): /note="This region represents a CpG dinucleotide"
  misc_feature (61)..(61): /note="Nucleotide may be methylated to form 5-methylcytosine"
tagctggtcatgatacttgcatcagattctcagaaggttgggcaacttcaaaaacaaagtcggagcctgggcaatatcctgagtcctcatctctacaaaaaatgtttaaaaagttatttggg

SEQ ID NO: 24420 - DNA, 122 bp, Homo sapiens
  misc_feature (61)..(62): /note="This region represents a CpG dinucleotide"
  misc_feature (61)..(61): /note="Nucleotide may be methylated to form 5-methylcytosine"
cactgtgcactggatgattaagagacagctgaggtcatctccttggacacctttgagtttcggattgataaacacatctaagctgctcagtatcagtccacatgggttgaactttggccaaa

SEQ ID NO: 24421 - DNA, 122 bp, Homo sapiens
  misc_feature (61)..(62): /note="This region represents a CpG dinucleotide"
  misc_feature (61)..(61): /note="Nucleotide may be methylated to form 5-methylcytosine"
caccattaagcttcagattgagagaaacaccattgagttggcaaatgctttcgatgtgtacgtgcagaaagtcatatgtatctacaattttccagacagcggcaaagagaaatggaaactct

SEQ ID NO: 24422 - DNA, 122 bp, Homo sapiens
  misc_feature (61)..(62): /note="This region represents a CpG dinucleotide"
  misc_feature (61)..(61): /note="Nucleotide may be methylated to form 5-methylcytosine"
ctcatttctctgtgaccagtaagtagggaaagcaagcacacatacacacacacacacacacgtgcacacgcacactgacagacaaccttgctcactcacatgggcatgcccaaacccttctt

SEQ ID NO: 24423 - DNA, 122 bp, Homo sapiens
  misc_feature (61)..(62): /note="This region represents a CpG dinucleotide"
  misc_feature (61)..(61): /note="Nucleotide may be methylated to form 5-methylcytosine"
agaggaagtgtgtagccatctcggcttaattggaagacatgtgaaggtgatgggtaaatacgtagctgacatgtgtcacatgagtaatataggtgttgccctgtagactcactgtgttgcca

SEQ ID NO: 24424 - DNA, 122 bp, Homo sapiens
  misc_feature (61)..(62): /note="This region represents a CpG dinucleotide"
  misc_feature (61)..(61): /note="Nucleotide may be methylated to form 5-methylcytosine"
tctgaagcttggtgtgagctcctggattgttccaaatcagtgatagaaggcgccacctaacgaggcagctattccatatctggagtgctcttatgtttaagggatattcatcttctagtagt

SEQ ID NO: 24425 - DNA, 122 bp, Homo sapiens
  misc_feature (61)..(62): /note="This region represents a CpG dinucleotide"
  misc_feature (61)..(61): /note="Nucleotide may be methylated to form 5-methylcytosine"
ctcgattgtaagttttaggtctcagtatttcagatggcctttggagttttataaccaaaacgcaggtttagtcgctcaccacttgcagattccaattaacaagagcaaggtctggtataaag

SEQ ID NO: 24426 - DNA, 122 bp, Homo sapiens
  misc_feature (61)..(62): /note="This region represents a CpG dinucleotide"
  misc_feature (61)..(61): /note="Nucleotide may be methylated to form 5-methylcytosine"
gactttgtttttactgaaaaattgaaacattaattttttcccttatgatttgtaccaaatcgtataagaaagaagaatgtcagcctgtagacccaacccaggaacttgctatttccatctga

SEQ ID NO: 24427 - DNA, 122 bp, Homo sapiens
  misc_feature (61)..(62): /note="This region represents a CpG dinucleotide"
  misc_feature (61)..(61): /note="Nucleotide may be methylated to form 5-methylcytosine"
tatccctcctcagtctaccttgcacttactgagggctcccactcttaggaataattccatcgtttcattttgtggcatcagagatgagtcattgacccggaagaagtcccgtaatgtttctc

SEQ ID NO: 24428 - DNA, 122 bp, Homo sapiens
  misc_feature (61)..(62): /note="This region represents a CpG dinucleotide"
  misc_feature (61)..(61): /note="Nucleotide may be methylated to form 5-methylcytosine"
gtaggatttctgcctggctctagtgatcaggctggacatccctgataatctgcttcaccccgttgctcctctgagcctgggtcctgccttgctgttctgagtcctccctctgtaggagttca

SEQ ID NO: 24429 - DNA, 122 bp, Homo sapiens
  misc_feature (61)..(62): /note="This region represents a CpG dinucleotide"
  misc_feature (61)..(61): /note="Nucleotide may be methylated to form 5-methylcytosine"
tcaccttggttttagaaatttcccgttgctgtggttgtaaggatacatgattctggcacacggcctcttagcacagttttgatggacagtagcagcttctggctagtctccctgtttcagtt

SEQ ID NO: 24430 - DNA, 122 bp, Homo sapiens
  misc_feature (61)..(62): /note="This region represents a CpG dinucleotide"
  misc_feature (61)..(61): /note="Nucleotide may be methylated to form 5-methylcytosine"
taaaaacttgacttggttgttatatagaccaggtttccagcccatctgtgccacagagtgcgttgggcaaggacttcacctttccaggatcacttctcccatctgtgaatcttggtttttgg

SEQ ID NO: 24431 - DNA, 122 bp, Homo sapiens
  misc_feature (61)..(62): /note="This region represents a CpG dinucleotide"
  misc_feature (61)..(61): /note="Nucleotide may be methylated to form 5-methylcytosine"
gagcaaggggagaagtaaagagattagagagaaggtgtgtcatagcatgcagggccttaacggccattctaaagaaccttactctgagcgaaatgagggaaagagagttttgaacaggagtg

SEQ ID NO: 24432 - DNA, 122 bp, Homo sapiens
  misc_feature (61)..(62): /note="This region represents a CpG dinucleotide"
  misc_feature (61)..(61): /note="Nucleotide may be methylated to form 5-methylcytosine"
gcagtttgctgatttccacatctttcactgggaggggttcacggtgtcacttgtgaaatccgtgtcttgagagttacacattgatacctgaagtgaaaggtgtcagctgaccgtgagtggat

SEQ ID NO: 24433 - DNA, 122 bp, Homo sapiens
  misc_feature (61)..(62): /note="This region represents a CpG dinucleotide"
  misc_feature (61)..(61): /note="Nucleotide may be methylated to form 5-methylcytosine"
ttctttgtggtttttacaagccctcttaggctcctaatatttctatagcaacaatttcaacgtttattttagaatgtggtcagaattaaccgacagaagaccaaacaggataaaataggttt

SEQ ID NO: 24434 - DNA, 122 bp, Homo sapiens
  misc_feature (61)..(62): /note="This region represents a CpG dinucleotide"
  misc_feature (61)..(61): /note="Nucleotide may be methylated to form 5-methylcytosine"
gctgatcccaaaatccacaatcatagccctaagcatctaggagttccctatctaaatttccgtaccacactacatggtgactccacttagacattcttctgtcacctacaccttaacatata

SEQ ID NO: 24435 - DNA, 122 bp, Homo sapiens
  misc_feature (61)..(62): /note="This region represents a CpG dinucleotide"
  misc_feature (61)..(61): /note="Nucleotide may be methylated to form 5-methylcytosine"
ggggacagtgagagggcccctctcctggctggttggagatgcagatatggagactcctcccggaagcccacctggctgtgagccgagccggagcaggactaaccttgttgccggggccttct

SEQ ID NO: 24436 - DNA, 122 bp, Homo sapiens
  misc_feature (61)..(62): /note="This region represents a CpG dinucleotide"
  misc_feature (61)..(61): /note="Nucleotide may be methylated to form 5-methylcytosine"
caccacgcacagctaatttttgtatttttttggtagatacagggtagagaataacgaagacgtacttatagaagcagaggctggaggccatgatttcccagacagaaagaaacagaaagaga

SEQ ID NO: 24437 - DNA, 122 bp, Homo sapiens
  misc_feature (61)..(62): /note="This region represents a CpG dinucleotide"
  misc_feature (61)..(61): /note="Nucleotide may be methylated to form 5-methylcytosine"
atgttcacagcagcattactcacaacagcaaaaaatggaagcaacccaagtacccatcgacggatgaatggataaagaaaatatatggtctattcatacaatggaatattattcagccttaa

SEQ ID NO: 24438 - DNA, 122 bp, Homo sapiens
  misc_feature (61)..(62): /note="This region represents a CpG dinucleotide"
  misc_feature (61)..(61): /note="Nucleotide may be methylated to form 5-methylcytosine"
cctgcgctgtccgagagggatggggtttgacaggtctacacctgcgctgcctgggaggagcggagtttgacacatgtacacctgtgctgtccaagaggagcagggtttgacacgtctacacc

SEQ ID NO: 24439 - DNA, 122 bp, Homo sapiens
  misc_feature (61)..(62): /note="This region represents a CpG dinucleotide"
  misc_feature (61)..(61): /note="Nucleotide may be methylated to form 5-methylcytosine"
ttccctcccaccactgtttctgcttcctttaacaccagctagtccaactgtgtccaaccacgctgatgtacttgacatttccaatcaacactgtttactttcaacacccaggtgagaggctt

SEQ ID NO: 24440 - DNA, 122 bp, Homo sapiens
  misc_feature (61)..(62): /note="This region represents a CpG dinucleotide"
  misc_feature (61)..(61): /note="Nucleotide may be methylated to form 5-methylcytosine"
aggttcaggctagcaggttcaggctctggggacaggaaacgtgcctgttgcttatttctgcgtccataatggctagtacagagaccacacgtcactgcatagtgagggacactgggggtgtg

SEQ ID NO: 24441 - DNA, 122 bp, Homo sapiens
  misc_feature (61)..(62): /note="This region represents a CpG dinucleotide"
  misc_feature (61)..(61): /note="Nucleotide may be methylated to form 5-methylcytosine"
tagcacataaggggagtggctggaaggtccactgttcttgtttagggagagcttttcaggcgtggtgcagccagctgttgaaagtgcttctccagggtgactctattagctcttggggaagc

SEQ ID NO: 24442 - DNA, 122 bp, Homo sapiens
  misc_feature (61)..(62): /note="This region represents a CpG dinucleotide"
  misc_feature (61)..(61): /note="Nucleotide may be methylated to form 5-methylcytosine"
ctgggattaggtccatgttagagtatgatcctcttatatgttgctagatttgatttcttgcgctatctttacctggctttgatgcaggtaaataccctgatgtcagggtaatacaggatgca

SEQ ID NO: 24443 - DNA, 122 bp, Homo sapiens
  misc_feature (61)..(62): /note="This region represents a CpG dinucleotide"
  misc_feature (61)..(61): /note="Nucleotide may be methylated to form 5-methylcytosine"
tctctggaaccctgtctagcagcaggaatggcgcagtgactcctggaaggcctattcaaccgcaaatctacaattgattgatgactcctttaggttttgcaggaagtcacagcaataatcca

SEQ ID NO: 24444 - DNA, 122 bp, Homo sapiens
  misc_feature (61)..(62): /note="This region represents a CpG dinucleotide"
  misc_feature (61)..(61): /note="Nucleotide may be methylated to form 5-methylcytosine"
gaagggattcattttcctgtttaggaaatgtgatgtcgagctccatgaggctgatgagcacgctgggtgggaccacaaacaggccccagtgaaatcaattatgtgggtgtcttaggacaaaa

SEQ ID NO: 24445 - DNA, 122 bp, Homo sapiens
  misc_feature (61)..(62): /note="This region represents a CpG dinucleotide"
  misc_feature (61)..(61): /note="Nucleotide may be methylated to form 5-methylcytosine"
gaatgactgtactgtagaaattcctcttcctctttgtgacattcccaccagcaatgcatgcgggtttcaatttctccacatccttgccaacacttgttattttctctttctctcttttaata

SEQ ID NO: 24446 - DNA, 122 bp, Homo sapiens
  misc_feature (61)..(62): /note="This region represents a CpG dinucleotide"
  misc_feature (61)..(61): /note="Nucleotide may be methylated to form 5-methylcytosine"
cgtgatgtccttggtcaagggctctcctctgggccggtggtggttgcagagagaagcccccgccgccgtcgctcctcgggaaaggaagtcgcgggtgaacaaccgaatatgcgatgaaaagg

SEQ ID NO: 24447 - DNA, 122 bp, Homo sapiens
  misc_feature (61)..(62): /note="This region represents a CpG dinucleotide"
  misc_feature (61)..(61): /note="Nucleotide may be methylated to form 5-methylcytosine"
ttcagtctattagaaagatcttcacagcccacgcaagcagggctggaagtaggaggctaacggaatgagagtagcatttcaggaaactgctatactgtgtgcattaggaaactggtttgcta

SEQ ID NO: 24448 - DNA, 122 bp, Homo sapiens
  misc_feature (61)..(62): /note="This region represents a CpG dinucleotide"
  misc_feature (61)..(61): /note="Nucleotide may be methylated to form 5-methylcytosine"
acacacagggtagagaaaattcaaaccgataaggcatcaggcaaagcaaaactgctttaacgaaggtgagtcataatgccactcagggagatgaatcaggtgcccacatgtccaatcacttt

SEQ ID NO: 24449 - DNA, 122 bp, Homo sapiens
  misc_feature (61)..(62): /note="This region represents a CpG dinucleotide"
  misc_feature (61)..(61): /note="Nucleotide may be methylated to form 5-methylcytosine"
taattcatatgtaattaccagtatagtcatcaaagttgactcttcctctcattgtgttcacgacagactctggctgctcaaatatttccttctgcataaatgaactgaagttgcctatagta

SEQ ID NO: 24450 - DNA, 122 bp, Homo sapiens
  misc_feature (61)..(62): /note="This region represents a CpG dinucleotide"
  misc_feature (61)..(61): /note="Nucleotide may be methylated to form 5-methylcytosine"
actgaatgtctgggctgtcctgtcttttaccctcaactgtcaggcattggtccccctgcccgcattcaccttcccatgacacttgatcaaaagctgctactcatatggccatggctgagcca

SEQ ID NO: 24451 - DNA, 122 bp, Homo sapiens
  misc_feature (61)..(62): /note="This region represents a CpG dinucleotide"
  misc_feature (61)..(61): /note="Nucleotide may be methylated to form 5-methylcytosine"
aggtttagtgttatggcccaagatgtcccaccccttccagtaaatggccactggtttgctcgaaggtagttagatcaccatcaagttcctcaggataagaagcactcctacatgacaaacca

SEQ ID NO: 24452 - DNA, 122 bp, Homo sapiens
  misc_feature (61)..(62): /note="This region represents a CpG dinucleotide"
  misc_feature (61)..(61): /note="Nucleotide may be methylated to form 5-methylcytosine"
tttgatgataacaaagagaagctagtagtgattccacctatttctgctgccaaaaagcctcgcaagcctataacaacaccctttagtacaaggaaaaggccagaaaataaaaactttatagt

SEQ ID NO: 24453 - DNA, 122 bp, Homo sapiens
  misc_feature (61)..(62): /note="This region represents a CpG dinucleotide"
  misc_feature (61)..(61): /note="Nucleotide may be methylated to form 5-methylcytosine"
aatggtggacgctcatgactgtgtatgtgtttttgtatatctgtctgtctgggccggtctcgggggacccctaagggtgaccgtaaggcgaaaaacgtttgaaaaccacggccctgagttaa

SEQ ID NO: 24454 - DNA, 122 bp, Homo sapiens
  misc_feature (61)..(62): /note="This region represents a CpG dinucleotide"
  misc_feature (61)..(61): /note="Nucleotide may be methylated to form 5-methylcytosine"
atcctcacgaagcatattctatgggaaaagtaaaccataaacaagataaaacaagctgcacggaaagacttcagagcctatggcatgctgatatgtactgtgaaatctgcatggtaagcagt

SEQ ID NO: 24455 - DNA, 122 bp, Homo sapiens
  misc_feature (61)..(62): /note="This region represents a CpG dinucleotide"
  misc_feature (61)..(61): /note="Nucleotide may be methylated to form 5-methylcytosine"
ttctcattttcattttgaaattaccaacacaatcacagacttcttgtttacagacactcacgtaacacttgcccaacaatgagcaaccctgtgcttagtcattcagtgattaaactttaaat

SEQ ID NO: 24456 - DNA, 122 bp, Homo sapiens
  misc_feature (61)..(62): /note="This region represents a CpG dinucleotide"
  misc_feature (61)..(61): /note="Nucleotide may be methylated to form 5-methylcytosine"
tgtgccaggatatcgagatcaagatgccagcaacatacctcacagtgctcagaatgtcagcgtgtcccaggtgtggtgcaggcagagagcaggagatggttctgttttgccgaaggacctgt

SEQ ID NO: 24457 - DNA, 122 bp, Homo sapiens
  misc_feature (61)..(62): /note="This region represents a CpG dinucleotide"
  misc_feature (61)..(61): /note="Nucleotide may be methylated to form 5-methylcytosine"
ccatcactaactcaattgcctactattctgagggggcggatagagttcctgggatattcccgggaataccttcttaaagctgtattctctcaaagccaaaatcagtggagttggatgaagca

SEQ ID NO: 24458 - DNA, 122 bp, Homo sapiens
  misc_feature (61)..(62): /note="This region represents a CpG dinucleotide"
  misc_feature (61)..(61): /note="Nucleotide may be methylated to form 5-methylcytosine"
catcagccaggcgcggtggctcacgcctgtaatcccagcactttgggaggccgaggcaggcggatcacctgatgaagcagtaccattgcatacctcattttacagacaaggaaacggaggct

SEQ ID NO: 24459 - DNA, 122 bp, Homo sapiens
  misc_feature (61)..(62): /note="This region represents a CpG dinucleotide"
  misc_feature (61)..(61): /note="Nucleotide may be methylated to form 5-methylcytosine"
caaggagtgtgataccctctagaagctgagaatgcccttcagctgaagccagcaaggaaacggggatttccgtcctaaaaccacaaggtactgaattatgccttgaccagaaatggctcctc

SEQ ID NO: 24460 - DNA, 122 bp, Homo sapiens
  misc_feature (61)..(62): /note="This region represents a CpG dinucleotide"
  misc_feature (61)..(61): /note="Nucleotide may be methylated to form 5-methylcytosine"
tttcaaggtcttttactctgaggttggcgcagataaatccctgcaggagcagttgcacagcgtgcctctcagccgggacatcccgaccacggtgagtctttccatcctggcagcccactcaa

SEQ ID NO: 24461 - DNA, 122 bp, Homo sapiens
  misc_feature (61)..(62): /note="This region represents a CpG dinucleotide"
  misc_feature (61)..(61): /note="Nucleotide may be methylated to form 5-methylcytosine"
gggctgatgatgcatagtgaagatttttgaggttttcccttcatccattagcctggcattcggtcactctcaaaacatgtattcagtgcttgctgtgtgcataagacactttgctctggggg

SEQ ID NO: 24462 - DNA, 122 bp, Homo sapiens
  misc_feature (61)..(62): /note="This region represents a CpG dinucleotide"
  misc_feature (61)..(61): /note="Nucleotide may be methylated to form 5-methylcytosine"
ctactatcagtcagtttgaccagagaaacataaacactatgagtaacagagtatggtttacgatagagattatgaggatttatcatagggattagagtatagacagttgtgggagctgttgg

SEQ ID NO: 24463 - DNA, 122 bp, Homo sapiens
  misc_feature (61)..(62): /note="This region represents a CpG dinucleotide"
  misc_feature (61)..(61): /note="Nucleotide may be methylated to form 5-methylcytosine"
ttgtgggcacaaaatctctttctcttccttaacccgcatctgtagccttttgcactacctcgtcactagcagaaaataggatttttcacctgcaaatggtgaagagagaagaggctagccta

SEQ ID NO: 24464 - DNA, 122 bp, Homo sapiens
  misc_feature (61)..(62): /note="This region represents a CpG dinucleotide"
  misc_feature (61)..(61): /note="Nucleotide may be methylated to form 5-methylcytosine"
tgatcactgcggttcaaatcctggcttcatcacttattaggtgagtgatcgtgagaagatcgttctgtgcctatctgtgcctgttttctctattaaaatagggatgatagtaatagtaccta

SEQ ID NO: 24465 - DNA, 122 bp, Homo sapiens
  misc_feature (61)..(62): /note="This region represents a CpG dinucleotide"
  misc_feature (61)..(61): /note="Nucleotide may be methylated to form 5-methylcytosine"
taacacaactgcacttgtacccctaagtccccccaaataaaacaatttttgtggcgggtccggaaccctttctagaccaacagacctcctcccgggctcggcggcggtctgctcgcacttac

SEQ ID NO: 24466 - DNA, 122 bp, Homo sapiens
  misc_feature (61)..(62): /note="This region represents a CpG dinucleotide"
  misc_feature (61)..(61): /note="Nucleotide may be methylated to form 5-methylcytosine"
ctggcctgggagagattcttggtctagctcccagcacggagccttgcttgtgtcccagggcggcactaaccagaaccagaaaaggaaatctttggccctcggggagaattatgccaattatc

SEQ ID NO: 24467 - DNA, 122 bp, Homo sapiens
  misc_feature (61)..(62): /note="This region represents a CpG dinucleotide"
  misc_feature (61)..(61): /note="Nucleotide may be methylated to form 5-methylcytosine"
caagtgtgtatattaatcccaagcaccttcatcctttcaattcccttgctcagtcctcaccgccagtcctcataagcacaatacccacaagggaagctcacgtggcagagacaggaaaggaa

SEQ ID NO: 24468 - DNA, 122 bp, Homo sapiens
  misc_feature (61)..(62): /note="This region represents a CpG dinucleotide"
  misc_feature (61)..(61): /note="Nucleotide may be methylated to form 5-methylcytosine"
tttgcaattttgtcactagaaagtcacttccctctttcactttcatgacatttgtacttacgtttgttttctgtttgctcacaaataatgtcatgttttgctttttaggaaagttcaaatga

SEQ ID NO: 24469 - DNA, 122 bp, Homo sapiens
  misc_feature (61)..(62): /note="This region represents a CpG dinucleotide"
  misc_feature (61)..(61): /note="Nucleotide may be methylated to form 5-methylcytosine"
gcgcgtgctgtttggcaacaacctgaacttctggctgcacaagcttgtcttcgtggatgccgtggccttcctcacggggaagcgcctctccctgccattggaccgctacatcctggtggaca

SEQ ID NO: 24470 - DNA, 122 bp, Homo sapiens
  misc_feature (61)..(62): /note="This region represents a CpG dinucleotide"
  misc_feature (61)..(61): /note="Nucleotide may be methylated to form 5-methylcytosine"
cttaaaaccttctaatctctgcctatcatctttgagatcaggtccagagttatctggctccggccctatcaaactctctaatcatttatctcaccattaaagtcacacatttcactttccag

SEQ ID NO: 24471 - DNA, 122 bp, Homo sapiens
  misc_feature (61)..(62): /note="This region represents a CpG dinucleotide"
  misc_feature (61)..(61): /note="Nucleotide may be methylated to form 5-methylcytosine"
ctacaatggctgagtcaggtatcccagggatctgtgacgagggagctggggcatgggtgtcggaccaaagacgcctaagtttgaatcccagctgtgagcttgggcaagctcctcaacctctc

SEQ ID NO: 24472 - DNA, 122 bp, Homo sapiens
  misc_feature (61)..(62): /note="This region represents a CpG dinucleotide"
  misc_feature (61)..(61): /note="Nucleotide may be methylated to form 5-methylcytosine"
tgagggcctggcagaggtgggctctgacccacccctcatgggctgggggccgtggtgagtcgcccttcctgcccacacgccccctcctcacaggccatggcgggagccggcgtcatctcagg

SEQ ID NO: 24473 - DNA, 122 bp, Homo sapiens
  misc_feature (61)..(62): /note="This region represents a CpG dinucleotide"
  misc_feature (61)..(61): /note="Nucleotide may be methylated to form 5-methylcytosine"
ctcagggtaaaagagcttatggtattcggcagtgacaacccccagtcctcaatggcttaacgcaagtccactgggagtccaggtgcatctccaggacagtggccctttacataatgactgca

SEQ ID NO: 24474 - DNA, 122 bp, Homo sapiens
  misc_feature (61)..(62): /note="This region represents a CpG dinucleotide"
  misc_feature (61)..(61): /note="Nucleotide may be methylated to form 5-methylcytosine"
ttaagatcaatgtgttttaggctcaagggctgtcataacagttaatcctatttccccagccgtctattgcaatgtatttatgaaaagtcgattttatcagttaattagctggtccttaggaa

SEQ ID NO: 24475 - DNA, 122 bp, Homo sapiens
  misc_feature (61)..(62): /note="This region represents a CpG dinucleotide"
  misc_feature (61)..(61): /note="Nucleotide may be methylated to form 5-methylcytosine"
tttaattacgactgttacctttatggccctgagctatctgtcctccagctgaaatgtaaacgtaactgagtagtgctcttttcatgtgtgcccctgctttactgtcctctagtgaaggtcta

SEQ ID NO: 24476 - DNA, 122 bp, Homo sapiens
  misc_feature (61)..(62): /note="This region represents a CpG dinucleotide"
  misc_feature (61)..(61): /note="Nucleotide may be methylated to form 5-methylcytosine"
attacactttgaagcttatgcctctgactgccacatgaagcagaactgtgagtccatgagcgtggtactgggaagtaggcttgtaaaagctgggtggggccagctgaggaggctctgaaatg

SEQ ID NO: 24477 - DNA, 122 bp, Homo sapiens
  misc_feature (61)..(62): /note="This region represents a CpG dinucleotide"
  misc_feature (61)..(61): /note="Nucleotide may be methylated to form 5-methylcytosine"
tttttaatgcaacaccttttaactcatttaaggctggcctcagtgtctgtattcctccagcgtgttcattttgcagtggaaagttttcaggaaaattggactttacccatttatagacttca

SEQ ID NO: 24478 - DNA, 122 bp, Homo sapiens
  misc_feature (61)..(62): /note="This region represents a CpG dinucleotide"
  misc_feature (61)..(61): /note="Nucleotide may be methylated to form 5-methylcytosine"
cagcggtctccagcctttttggtgccaggatttcgtggaagacaatttttccatgcaccacggtggggattgtgaggaggtagggtagggcgatggtgtgagaatgattcaagtggattaca

SEQ ID NO: 24479 - DNA, 122 bp, Homo sapiens
  misc_feature (61)..(62): /note="This region represents a CpG dinucleotide"
  misc_feature (61)..(61): /note="Nucleotide may be methylated to form 5-methylcytosine"
ggacaggccagcgaccccaatgcatatgagctgatacagaaaattcacaccctgcagaagcgtctcatcagcaagactgaagaggtggttgaaaaagagctgctcctccaggtagcattttt

SEQ ID NO: 24480 - DNA, 122 bp, Homo sapiens
  misc_feature (61)..(62): /note="This region represents a CpG dinucleotide"
  misc_feature (61)..(61): /note="Nucleotide may be methylated to form 5-methylcytosine"
attgtacagcataggcttcaaacctgccacagcagagaaacacctgttgctgctggagcacggccagcacaggtcatctggagcaatgtgacactgtgctgcaaccctgtccgcccgtcaca

SEQ ID NO: 24481 - DNA, 122 bp, Homo sapiens
  misc_feature (61)..(62): /note="This region represents a CpG dinucleotide"
  misc_feature (61)..(61): /note="Nucleotide may be methylated to form 5-methylcytosine"
tggtcaacatctgctctgactggttgtcaaatattctgacattagacacagccccaggcacgtcctgcacacatgcactcacacaatgtcccacagggacacacagtgttcagaattgtcac

SEQ ID NO: 24482 - DNA, 122 bp, Homo sapiens
  misc_feature (61)..(62): /note="This region represents a CpG dinucleotide"
  misc_feature (61)..(61): /note="Nucleotide may be methylated to form 5-methylcytosine"
acaccagtggcttcctgacccaggcctcagcagcctctttccctgcagtgatggttcattcgcatatgagtctgtgccttggcaacaaagcgccactcagccggctggatcgctgtctgtgg

SEQ ID NO: 24483 - DNA, 122 bp, Homo sapiens
  misc_feature (61)..(62): /note="This region represents a CpG dinucleotide"
  misc_feature (61)..(61): /note="Nucleotide may be methylated to form 5-methylcytosine"
agaccttttcctcaaagtaaccaaatcaagatggcgaatctcaagcacagtcatgtgttgcgtaagaacagggctatgttctgggaaatgcttcattcggtgatctcatcattgtgggaaca

SEQ ID NO: 24484 - DNA, 122 bp, Homo sapiens
  misc_feature (61)..(62): /note="This region represents a CpG dinucleotide"
  misc_feature (61)..(61): /note="Nucleotide may be methylated to form 5-methylcytosine"
cccagcctcaggaaccacattctggacctccccatgcaggcagcaaggccacgccacacacgcagttgataaccacaggacagacactgattaagtggtgacttcacgtggagacctaggac

SEQ ID NO: 24485 - DNA, 122 bp, Homo sapiens
  misc_feature (61)..(62): /note="This region represents a CpG dinucleotide"
  misc_feature (61)..(61): /note="Nucleotide may be methylated to form 5-methylcytosine"
gctcccaaggccaaaggaacacttcccttggcctcccaggcttaacattaaaataactgtcggatgcagtggctcacacctataatcctagcactttgggaggttgaggcaggaagatcgct

SEQ ID NO: 24486 - DNA, 122 bp, Homo sapiens
  misc_feature (61)..(62): /note="This region represents a CpG dinucleotide"
  misc_feature (61)..(61): /note="Nucleotide may be methylated to form 5-methylcytosine"
ggccaccttggagactatagcttccaggagcttctcattctcacagtaatccacattaagcgtcaagaagtttgtcaaaattacttaagtgttcctaccagtttatggctccagcagcttct

SEQ ID NO: 24487 - DNA, 122 bp, Homo sapiens
  misc_feature (61)..(62): /note="This region represents a CpG dinucleotide"
  misc_feature (61)..(61): /note="Nucleotide may be methylated to form 5-methylcytosine"
tttgtagacagggtatcaccatgttgccaaggctggttttgaacccctgggctcaacatccgcctcctcggtgctgggattacaggcatgagccaccatacccagcccaaaggaaggaaatt

SEQ ID NO: 24488 - DNA, 122 bp, Homo sapiens
  misc_feature (61)..(62): /note="This region represents a CpG dinucleotide"
  misc_feature (61)..(61): /note="Nucleotide may be methylated to form 5-methylcytosine"
attatcatcacatggcagttactcactcagcaaatattctttctgagaggcggtggaacacgttggttacaagcacaagctttgacatgaagcggctcagctctaccattaaccagcagatt

SEQ ID NO: 24489 - DNA, 122 bp, Homo sapiens
  misc_feature (61)..(62): /note="This region represents a CpG dinucleotide"
  misc_feature (61)..(61): /note="Nucleotide may be methylated to form 5-methylcytosine"
ctaaatggtctaactttatattgaaagaccatttaagattggaaagtgcaaacaatataccgtttaatctgagagttgatgtagtagttatgaatcaaacacaaggtataaagaccctagca

SEQ ID NO: 24490 - DNA, 122 bp, Homo sapiens
  misc_feature (61)..(62): /note="This region represents a CpG dinucleotide"
  misc_feature (61)..(61): /note="Nucleotide may be methylated to form 5-methylcytosine"
agcatgctagtggctgatatggaattagaactctcttatctcgacctatacacatctgatcgatcttatgtctagctgtttctctcaggagccctagaagggaagtgattttaccaccattt

SEQ ID NO: 24491 - DNA, 122 bp, Homo sapiens
  misc_feature (61)..(62): /note="This region represents a CpG dinucleotide"
  misc_feature (61)..(61): /note="Nucleotide may be methylated to form 5-methylcytosine"
aaacgcctttctctcccaagcaaaagctccaggaggaatcttctggagcaaagttagaaccgcagggaagcttgaaaagaggaaacagaccagcctggccggtggaggttaaattaaactac

SEQ ID NO: 24492 - DNA, 122 bp, Homo sapiens
  misc_feature (61)..(62): /note="This region represents a CpG dinucleotide"
  misc_feature (61)..(61): /note="Nucleotide may be methylated to form 5-methylcytosine"
aaagagaataagccagtgccatattgccacagggcaaaagtaacagagggagtttcatgtcgtcggaaggaagaacttcctaataaatggattcttccccagcttttggggttacttggaga

SEQ ID NO: 24493 - DNA, 122 bp, Homo sapiens
  misc_feature (61)..(62): /note="This region represents a CpG dinucleotide"
  misc_feature (61)..(61): /note="Nucleotide may be methylated to form 5-methylcytosine"
ttctgggcactgaggatatgacagtgaataagcaggtgaaaattccttccttgatggcaccgatattctagtgggcagttgtaatcccaccactgcacaactgaacaagcctgaatgtctcc

SEQ ID NO: 24494 - DNA, 122 bp, Homo sapiens
  misc_feature (61)..(62): /note="This region represents a CpG dinucleotide"
  misc_feature (61)..(61): /note="Nucleotide may be methylated to form 5-methylcytosine"
ccactgtttctctggcgtctgaatgctgactcattccccgggcaaccccagtttcaattccgatagctctctgacattttgtcactctgcatagttgagatgggacacctctcaggttagcc

SEQ ID NO: 24495 - DNA, 122 bp, Homo sapiens
  misc_feature (61)..(62): /note="This region represents a CpG dinucleotide"
  misc_feature (61)..(61): /note="Nucleotide may be methylated to form 5-methylcytosine"
gaacacatacttcatacctaaggccttcttttcctcttgtttttaaaagtattgtatacacgttgcagttgcacatggatttgttttactaagatgcaagttaaaaccctccttaaaatcct

SEQ ID NO: 24496 - DNA, 122 bp, Homo sapiens
  misc_feature (61)..(62): /note="This region represents a CpG dinucleotide"
  misc_feature (61)..(61): /note="Nucleotide may be methylated to form 5-methylcytosine"
tctggggacaggggtctgaaaagtcctagctcccacctgttatgatcaggatccgaactgcgcagcagctgctttgcgtacggaactttgctccctcctcttgttattaaactttttggctc

SEQ ID NO: 24497 - DNA, 122 bp, Homo sapiens
  misc_feature (61)..(62): /note="This region represents a CpG dinucleotide"
  misc_feature (61)..(61): /note="Nucleotide may be methylated to form 5-methylcytosine"
actgagggagtgggtcagcttggatcaacgccagcactctggatgtcagcagtggccaagcgtcttccttctgactctgtaaagctggagcaatcctcttattgcacaggtactggcactgt

SEQ ID NO: 24498 - DNA, 122 bp, Homo sapiens
  misc_feature (61)..(62): /note="This region represents a CpG dinucleotide"
  misc_feature (61)..(61): /note="Nucleotide may be methylated to form 5-methylcytosine"
cagcattttttgagacactgagctatgtattagtcagcatattccactcatgcttttcaacgtaggataacaggttcaacaaaaagaaatctgaaaatcctgtcagtagtcttctctaacca

SEQ ID NO: 24499 - DNA, 122 bp, Homo sapiens
  misc_feature (61)..(62): /note="This region represents a CpG dinucleotide"
  misc_feature (61)..(61): /note="Nucleotide may be methylated to form 5-methylcytosine"
actacattacccagaaaccctgtggcagaacctgggctgtcccatggctttcattcctaccggcagtagcctgagctgctgagtaggcagagagaatctcctctgagctctaaagaccaatc

SEQ ID NO: 24500 - DNA, 122 bp, Homo sapiens
  misc_feature (61)..(62): /note="This region represents a CpG dinucleotide"
  misc_feature (61)..(61): /note="Nucleotide may be methylated to form 5-methylcytosine"
gaagtgttgatggttaaacaagagaacatccgtgtgatttgcatattgccattagtcattcgtgggtctgcagtcaaatttagtaacctggtgtttaattcaaacataggcatatttttgtt

SEQ ID NO: 24501 - DNA, 122 bp, Homo sapiens
  misc_feature (61)..(62): /note="This region represents a CpG dinucleotide"
  misc_feature (61)..(61): /note="Nucleotide may be methylated to form 5-methylcytosine"
aattagctctgcttttcaaggagcagtaccattcagtaaaagattactgtctagtattaccggctcacccttgaattctttcctgggcaaagccaagaaccttcccagggtaagccccaatt

SEQ ID NO: 24502 - DNA, 122 bp, Homo sapiens
  misc_feature (61)..(62): /note="This region represents a CpG dinucleotide"
  misc_feature (61)..(61): /note="Nucleotide may be methylated to form 5-methylcytosine"
tggaagccagtcacaccaccagagcagcttcattctgtgaagaagttccaatgatccgcccgccttggcctcccaaagtgctcggattataggcgtgagccaccacacccggccctaataca

SEQ ID NO: 24503 - DNA, 122 bp, Homo sapiens
  misc_feature (61)..(62): /note="This region represents a CpG dinucleotide"
  misc_feature (61)..(61): /note="Nucleotide may be methylated to form 5-methylcytosine"
aactctggaagtatcgcctttggctgcagtgccagattctggtgaggatttcctggaccccgatttatatctgaaaaaacactaaaaataacagaagcagggcaggaagtggctatgataac

SEQ ID NO: 24504 - DNA, 122 bp, Homo sapiens
  misc_feature (61)..(62): /note="This region represents a CpG dinucleotide"
  misc_feature (61)..(61): /note="Nucleotide may be methylated to form 5-methylcytosine"
tttcattccatttggctcaggtgtcagggatctatatttaacttgtgttaggcatgcgtccgaagagctggaaggctgaggatgtcaatggctttcagatgtcaggataaccttaaggatag

SEQ ID NO: 24505 - DNA, 122 bp, Homo sapiens
  misc_feature (61)..(62): /note="This region represents a CpG dinucleotide"
  misc_feature (61)..(61): /note="Nucleotide may be methylated to form 5-methylcytosine"
gctgtcgcagggccgacaggggcgactgaaaaagtgactttcgtccccttttacaaaatgcgtcccagcagggttcccccctaccccggggcaaaaggccgtgcgtggtgctcggcgtcctc

SEQ ID NO: 24506 - DNA, 122 bp, Homo sapiens
  misc_feature (61)..(62): /note="This region represents a CpG dinucleotide"
  misc_feature (61)..(61): /note="Nucleotide may be methylated to form 5-methylcytosine"
tcctcctcttcagcagcagctgcatcagctgcatcagcgtctacttcttcctcgcgcaggcgctgatgcagctcacccatatcctcgaagctagagcctgaggtatcatccatgttctccat

SEQ ID NO: 24507 - DNA, 122 bp, Homo sapiens
  misc_feature (61)..(62): /note="This region represents a CpG dinucleotide"
  misc_feature (61)..(61): /note="Nucleotide may be methylated to form 5-methylcytosine"
agggccctaggggaggatgtttccaagagctgccaagagcagtggggcccgggttctgcccgcctcttcctctgactgtttcctcatctggggtcacgggataagtgcagctccgcctccct

SEQ ID NO: 24508 - DNA, 122 bp, Homo sapiens
  misc_feature (61)..(62): /note="This region represents a CpG dinucleotide"
  misc_feature (61)..(61): /note="Nucleotide may be methylated to form 5-methylcytosine"
gggaagccctaactctggagggacagagacaggtaaggttagtttacttccttgagctttcgtcttcagtgctgcttacagccttaggatatctggtattcaggaaaggaggatgaggtagc

SEQ ID NO: 24509 - DNA, 122 bp, Homo sapiens
  misc_feature (61)..(62): /note="This region represents a CpG dinucleotide"
  misc_feature (61)..(61): /note="Nucleotide may be methylated to form 5-methylcytosine"
cagatgattttgtgattaaatacggcttctgattacttcctttcactcgtcttaggtcatcgtccactcaacctgccagtgcatctagatgactcatacatttatgctcttctgcccatttc

SEQ ID NO: 24510 - DNA, 122 bp, Homo sapiens
  misc_feature (61)..(62): /note="This region represents a CpG dinucleotide"
  misc_feature (61)..(61): /note="Nucleotide may be methylated to form 5-methylcytosine"
gtcaaactcccaggaactctgtctgcctcatgacctggtgtggaggccaccgctgagcaacgtccagtgtgtcctggtcacatctgggcccgcaccacctcacaggctcccggtgcgaagga

SEQ ID NO: 24511 - DNA, 122 bp, Homo sapiens
  misc_feature (61)..(62): /note="This region represents a CpG dinucleotide"
  misc_feature (61)..(61): /note="Nucleotide may be methylated to form 5-methylcytosine"
cctaaactgagatgggccctccaggcaaggccagcattacctcagtcctcggaaatgcatcgctctgcttgggggaatggccacacgtggctgagccccaggtggtgccaaggacaggagga

SEQ ID NO: 24512 - DNA, 122 bp, Homo sapiens
  misc_feature (61)..(62): /note="This region represents a CpG dinucleotide"
  misc_feature (61)..(61): /note="Nucleotide may be methylated to form 5-methylcytosine"
ggagtctgtattatcctaaggaaactgtaggaggcagcaaagtcctttttgtagctgggacgcataagaaaattcattagagagtccattgagtggtacttctgagatttcccaatgcagaa

SEQ ID NO: 24513 - DNA, 122 bp, Homo sapiens
  misc_feature (61)..(62): /note="This region represents a CpG dinucleotide"
  misc_feature (61)..(61): /note="Nucleotide may be methylated to form 5-methylcytosine"
ctgggctgatgtagaagcatcagttctgcctcaggctgggacagctggagtgtcagcctgcgcgttctgcctgggatccagcatggctgcggtccctggagggcttcagcttcccgccattc

SEQ ID NO: 24514 - DNA, 122 bp, Homo sapiens
  misc_feature (61)..(62): /note="This region represents a CpG dinucleotide"
  misc_feature (61)..(61): /note="Nucleotide may be methylated to form 5-methylcytosine"
atattctctgagtgtcaaaatggatatgactcagctgtgatccaccaaaagatgaggcagcgtgttaattcaaccctcactctctctatcagcatatggcaaggtttatggctgccaaaaaa

SEQ ID NO: 24515 - DNA, 122 bp, Homo sapiens
  misc_feature (61)..(62): /note="This region represents a CpG dinucleotide"
  misc_feature (61)..(61): /note="Nucleotide may be methylated to form 5-methylcytosine"
gaactacattaatatctggcaggggctctcaaatgtgccatagcaagctacttgattacacgtatgttatttagttaaatttgtgaaaattatgagatgctcaccaacccggtgataaactt

SEQ ID NO: 24516 - DNA, 122 bp, Homo sapiens
  misc_feature (61)..(62): /note="This region represents a CpG dinucleotide"
  misc_feature (61)..(61): /note="Nucleotide may be methylated to form 5-methylcytosine"
atccagcccagacactccgctcaccttcctccgcttgtcaaaattgatgtatccattctgcgaggaaaatggggatggggtgaaagttccaaccctaccttccggccacagagagagaatat

SEQ ID NO: 24517 - DNA, 122 bp, Homo sapiens
  misc_feature (61)..(62): /note="This region represents a CpG dinucleotide"
  misc_feature (61)..(61): /note="Nucleotide may be methylated to form 5-methylcytosine"
tccttatatgaaactaatatgtatctcccagattgtgatgaggattacaggcacaagatacgagaaaaagcttgctgacagaaatcactatacctgtataagataggaggggagggcttgcc

SEQ ID NO: 24518 - DNA, 122 bp, Homo sapiens
  misc_feature (61)..(62): /note="This region represents a CpG dinucleotide"
  misc_feature (61)..(61): /note="Nucleotide may be methylated to form 5-methylcytosine"
agcttggctctagggcaagctgccctgcacagctggatggcgtctggaaaggaatgtgaccgtgcagggcggggacctggaaggcaggattcaaagattccttcagaggctcttcgctggtg

SEQ ID NO: 24519 - DNA, 122 bp, Homo sapiens
  misc_feature (61)..(62): /note="This region represents a CpG dinucleotide"
  misc_feature (61)..(61): /note="Nucleotide may be methylated to form 5-methylcytosine"
gacctgcagcccctcctcaccctcggacagagtaaattcacgccatgcaggtttgccggacgagtccgagtggcccaggcattgtactaggacggacgtagctttttctacggccaaatggt

SEQ ID NO: 24520 - DNA, 122 bp, Homo sapiens
  misc_feature (61)..(62): /note="This region represents a CpG dinucleotide"
  misc_feature (61)..(61): /note="Nucleotide may be methylated to form 5-methylcytosine"
acacagctgtgtcaggagatgttggcccctacaggatatgaggctcctaagccaaggcatcgcctgtacctgccccaggcgaatcttgtctccttgcacctgagctgtgctgtgtgaactgc

SEQ ID NO: 24521 - DNA, 122 bp, Homo sapiens
  misc_feature (61)..(62): /note="This region represents a CpG dinucleotide"
  misc_feature (61)..(61): /note="Nucleotide may be methylated to form 5-methylcytosine"
atgaatacttaggacctgatgagagatctggatggcaccctgcagcacttgccacagatacgattactgtttttaattcttttgcctttgtcttgtgtctagattccaagaaccaggaggtt

SEQ ID NO: 24522 - DNA, 122 bp, Homo sapiens
  misc_feature (61)..(62): /note="This region represents a CpG dinucleotide"
  misc_feature (61)..(61): /note="Nucleotide may be methylated to form 5-methylcytosine"
actccttattcaatacatacagttttctccagcaaacaaagcaattcttctattgtagcacgcctcctttactatcattttcctatgtcaccatatctactcctgaacctttaatcactcaa

SEQ ID NO: 24523 - DNA, 122 bp, Homo sapiens
  misc_feature (61)..(62): /note="This region represents a CpG dinucleotide"
  misc_feature (61)..(61): /note="Nucleotide may be methylated to form 5-methylcytosine"
attggttggtgcccagccacattgagggaagatcttcccctcttagtccactgactcacacgccagtctgctctggaaacccagacagacacacccagaaggaatgttttaccatctctgta

SEQ ID NO: 24524 - DNA, 122 bp, Homo sapiens
  misc_feature (61)..(62): /note="This region represents a CpG dinucleotide"
  misc_feature (61)..(61): /note="Nucleotide may be methylated to form 5-methylcytosine"
tgagtcagagtgagtccaggttcacctgatggccagaatcatgccctttatagtgccccacgacactcacagccctgcagggcagaagggtctataagtggcccctcgcatgattcaagatg

SEQ ID NO: 24525 - DNA, 122 bp, Homo sapiens
  misc_feature (61)..(62): /note="This region represents a CpG dinucleotide"
  misc_feature (61)..(61): /note="Nucleotide may be methylated to form 5-methylcytosine"
ccctgggcagtgggaattcataaatatttaatggcctttcacatcaggaagcagtgaggacgcagctacctcagcagtgaggaaaacaggcaggggttggtgtggggagtagagggtaggga

SEQ ID NO: 24526 - DNA, 122 bp, Homo sapiens
  misc_feature (61)..(62): /note="This region represents a CpG dinucleotide"
  misc_feature (61)..(61): /note="Nucleotide may be methylated to form 5-methylcytosine"
aacacttgtctgtttacattaaccgagcagagcttagtcacccatcactggattcgacctcgagcagacagctctacctgactcagggtcggaagagtgatacaaggtgtgcaacatatgaa

SEQ ID NO: 24527 - DNA, 122 bp, Homo sapiens
  misc_feature (61)..(62): /note="This region represents a CpG dinucleotide"
  misc_feature (61)..(61): /note="Nucleotide may be methylated to form 5-methylcytosine"
caatcagagctcttgtctttttcttagtactgcttcctgtttatgatcacctgtttcacccgcttccccttccctgacccacctgagctctcctcctccttccccctcccaaccttcctctt

SEQ ID NO: 24528 - DNA, 122 bp, Homo sapiens
  misc_feature (61)..(62): /note="This region represents a CpG dinucleotide"
  misc_feature (61)..(61): /note="Nucleotide may be methylated to form 5-methylcytosine"
ggatgctgtgatttggtgattctctccaaaccaaatggtacccaagaatcggggcttacacggggtttcactgtagacagacaacgtgccttgagatttaaagggtatcatttttttataat

SEQ ID NO: 24529 - DNA, 122 bp, Homo sapiens
  misc_feature (61)..(62): /note="This region represents a CpG dinucleotide"
  misc_feature (61)..(61): /note="Nucleotide may be methylated to form 5-methylcytosine"
caggcgccgcaggttcccgagctcctgcaggtgggcagagagtcagagcgcggatgggcacgaagcagggggccagccccaccctgactcaccgggggcagtgctgacagctggttccggtc

SEQ ID NO: 24530 - DNA, 122 bp, Homo sapiens
  misc_feature (61)..(62): /note="This region represents a CpG dinucleotide"
  misc_feature (61)..(61): /note="Nucleotide may be methylated to form 5-methylcytosine"
aaccgatttggctaactgggtggagccctgaccccaagcaatatttcccttacctcttgccgtgatttcagtcacgtacaatttatcatacaaaaattcaaattaaaaatattagtaaattc

SEQ ID NO: 24531 - DNA, 122 bp, Homo sapiens
  misc_feature (61)..(62): /note="This region represents a CpG dinucleotide"
  misc_feature (61)..(61): /note="Nucleotide may be methylated to form 5-methylcytosine"
ttgaatgttagagttgagaaacttaaggcaggaccattcactgtattgcataattccttgcgcagcctgtgaggtggtttccaggcatgtattcataatgtgaacaatgttccctggctttg

SEQ ID NO: 24532 - DNA, 122 bp, Homo sapiens
  misc_feature (61)..(62): /note="This region represents a CpG dinucleotide"
  misc_feature (61)..(61): /note="Nucleotide may be methylated to form 5-methylcytosine"
agccagctaatctcagagtcggctgctcactgctccactgagctggagaaagcctgtttacgctagcctgagccctcgatgtgagagctttttaaggaccttgtaatttttctggaattaaa

SEQ ID NO: 24533 - DNA, 122 bp, Homo sapiens
  misc_feature (61)..(62): /note="This region represents a CpG dinucleotide"
  misc_feature (61)..(61): /note="Nucleotide may be methylated to form 5-methylcytosine"
agacagaatagaaaagtaagcttccttcctaccccggtcctcctccatatccccccaaaacgaacccaattgtttcctgttttgtgaatgccttctgctaccccatgtcaccgtattttaaa

SEQ ID NO: 24534 - DNA, 122 bp, Homo sapiens
  misc_feature (61)..(62): /note="This region represents a CpG dinucleotide"
  misc_feature (61)..(61): /note="Nucleotide may be methylated to form 5-methylcytosine"
attacacctcaactcacaatcggctcatgccttacaaccatctgtggctaagaggcaagtcggacttcctggtaaaccctcttctcttaggtgaagcatggagctgtgaccttattaacctg

SEQ ID NO: 24535 - DNA, 122 bp, Homo sapiens
  misc_feature (61)..(62): /note="This region represents a CpG dinucleotide"
  misc_feature (61)..(61): /note="Nucleotide may be methylated to form 5-methylcytosine"
aggcttcatcttaggtgaggaggcaggagagacaccctcccttcacttgtgccatccccacgctttgtccttaagctgtagtggtcccaggagataacctgtttacagcagcccattcagta

SEQ ID NO: 24536 - DNA, 122 bp, Homo sapiens
  misc_feature (61)..(62): /note="This region represents a CpG dinucleotide"
  misc_feature (61)..(61): /note="Nucleotide may be methylated to form 5-methylcytosine"
tgagaacaaagcacattgcaggctgacatttagaaatctcaaggcataaagatcagtttacgtggaaacaaagcctgccattcatctcctcttatccatgtacacagagcttccaggaaagt

SEQ ID NO: 24537 - DNA, 122 bp, Homo sapiens
  misc_feature (61)..(62): /note="This region represents a CpG dinucleotide"
  misc_feature (61)..(61): /note="Nucleotide may be methylated to form 5-methylcytosine"
gagctggtttagaagctcatagcagtctgggattgggacacagtggggcagtaggtgcaacgtggtgggtaaattttgcttttaactgtcccctacattgctttggcaggatcacttttctg

SEQ ID NO: 24538 - DNA, 122 bp, Homo sapiens
  misc_feature (61)..(62): /note="This region represents a CpG dinucleotide"
  misc_feature (61)..(61): /note="Nucleotide may be methylated to form 5-methylcytosine"
aggctaattgaccaagactccaagaaacattttttctagtcaatcaaggtcaaaacttaacgtgcttgtttatattgggggaatgtgcatataattacatatgtgttatgtatgtttattta

SEQ ID NO: 24539 - DNA, 122 bp, Homo sapiens
  misc_feature (61)..(62): /note="This region represents a CpG dinucleotide"
  misc_feature (61)..(61): /note="Nucleotide may be methylated to form 5-methylcytosine"
ctctcctccttcaaatccatcctgtagcagattaaagttcaagttcttgagagcacagaccgtgtaagtcattgctgtatccttaacacccagccctgtgcctggcacatagcaaaggcctg

SEQ ID NO: 24540 - DNA, 122 bp, Homo sapiens
  misc_feature (61)..(62): /note="This region represents a CpG dinucleotide"
  misc_feature (61)..(61): /note="Nucleotide may be methylated to form 5-methylcytosine"
agtcatcttaacagtacatgtattgcaacacagtagccattgcttaaatacctttgggatcgcttttattcttttaatatatacagagctaataaacatttgtcagttgagttttgggaact

SEQ ID NO: 24541 - DNA, 122 bp, Homo sapiens
  misc_feature (61)..(62): /note="This region represents a CpG dinucleotide"
  misc_feature (61)..(61): /note="Nucleotide may be methylated to form 5-methylcytosine"
aagttgtgaaaagaaaaaagagcatgcgggttatagctgggtcatgcagaccaagaaaaacggaatttcatgggttctggttgtccagttgctatagttgctttgaaaaccagaagtagctg

SEQ ID NO: 24542 - DNA, 122 bp, Homo sapiens
  misc_feature (61)..(62): /note="This region represents a CpG dinucleotide"
  misc_feature (61)..(61): /note="Nucleotide may be methylated to form 5-methylcytosine"
tctacctgccacatcacgactgcctcacagacagcagcagctcccttggcatactgaaaacgtgatctgacatgtaacatgtgctgtggcagagattgctagttgcctatcccaacacgcct

SEQ ID NO: 24543 - DNA, 122 bp, Homo sapiens
  misc_feature (61)..(62): /note="This region represents a CpG dinucleotide"
  misc_feature (61)..(61): /note="Nucleotide may be methylated to form 5-methylcytosine"
ataaaataattggtatctggaattatattctaaatgaaaaaaaccacatgggatttgaaacgtagaaacagggcaacttcagaaacaccagactgatgtgaattggagcatatttatagttc

SEQ ID NO: 24544 - DNA, 122 bp, Homo sapiens
  misc_feature (61)..(62): /note="This region represents a CpG dinucleotide"
  misc_feature (61)..(61): /note="Nucleotide may be methylated to form 5-methylcytosine"
ttcaccaaatattcacttagtgggatgtgactttgtaaaacatggttgagctggaagtgacgcaggttcagcacaaaggctttctgggtggatcttcccctgtggtttccaccccagagaag

SEQ ID NO: 24545 - DNA, 122 bp, Homo sapiens
  misc_feature (61)..(62): /note="This region represents a CpG dinucleotide"
  misc_feature (61)..(61): /note="Nucleotide may be methylated to form 5-methylcytosine"
gcgaagcccggccactgtcaccatgggctccagcctcgcctctctgggcctggtggtgagcggcttcagcaacaggtttccggtccccgcagagggtcccactctgaactcccgatttacag

SEQ ID NO: 24546 - DNA, 122 bp, Homo sapiens
  misc_feature (61)..(62): /note="This region represents a CpG dinucleotide"
  misc_feature (61)..(61): /note="Nucleotide may be methylated to form 5-methylcytosine"
gagtggctggaacacaaatccacctttccgagcacgacccagtgtgcgttccatcacaaacgctgactgtgagccggagtaaaatgcccctgaggaatccagactcaggaaaaaaacactca

SEQ ID NO: 24547 - DNA, 122 bp, Homo sapiens
  misc_feature (61)..(62): /note="This region represents a CpG dinucleotide"
  misc_feature (61)..(61): /note="Nucleotide may be methylated to form 5-methylcytosine"
ttactattgttaccgtggggtcgctcctgttcctgtaaatgctgaaagctactctggattcgtagcccaaagcgaacttccttctacacacactcactctggttccaccacagctgtgctgg

SEQ ID NO: 24548 - DNA, 122 bp, Homo sapiens
  misc_feature (61)..(62): /note="This region represents a CpG dinucleotide"
  misc_feature (61)..(61): /note="Nucleotide may be methylated to form 5-methylcytosine"
gggcctggctcacaattaggcagaagtgagcattgtggcattgtatgtcttcaaggattccgtttagaaactagactatgagatgaaatgaaacaatgcatgtaaagtgaccacaactgtac

SEQ ID NO: 24549 - DNA, 122 bp, Homo sapiens
  misc_feature (61)..(62): /note="This region represents a CpG dinucleotide"
  misc_feature (61)..(61): /note="Nucleotide may be methylated to form 5-methylcytosine"
ttaaaaaatattctttgtcttttggataactttctaggcatatctccgttgtgtaatttacggcacttcctgcatttgggccacttagtgatgattttggtggatggtgatggcaaggttag

SEQ ID NO: 24550 - DNA, 122 bp, Homo sapiens
  misc_feature (61)..(62): /note="This region represents a CpG dinucleotide"
  misc_feature (61)..(61): /note="Nucleotide may be methylated to form 5-methylcytosine"
tctagccatagtccactgccatacaaataagaggctaactttaagaaattcaattaaagccgggtgcggtctctcatgcttgtaatcccagcactttgggaggctgaggcaggcagatcacc

SEQ ID NO: 24551 - DNA, 122 bp, Homo sapiens
  misc_feature (61)..(62): /note="This region represents a CpG dinucleotide"
  misc_feature (61)..(61): /note="Nucleotide may be methylated to form 5-methylcytosine"
gctgcaaagaccttggagctgtgggcccaaaactgcttcttctcactatcctgagggatacgcccctttcagagagggcaactgactgtgtggtgtttatggaaggagttggggggagggca

SEQ ID NO: 24552 - DNA, 122 bp, Homo sapiens
  misc_feature (61)..(62): /note="This region represents a CpG dinucleotide"
  misc_feature (61)..(61): /note="Nucleotide may be methylated to form 5-methylcytosine"
gaacatatgtttctggcttacacatgtggcctggatagagctagggctcaccaggtcttacgcaattaaactgatggctcggtttgggactatctgaaatgagataacttccctcacttccc

SEQ ID NO: 24553 - DNA, 122 bp, Homo sapiens
  misc_feature (61)..(62): /note="This region represents a CpG dinucleotide"
  misc_feature (61)..(61): /note="Nucleotide may be methylated to form 5-methylcytosine"
tgctgtgggaaaaggtaatatatctgagttcccatggatctggttgataggttcacctggcgtgttccatatggggccaggcccaggccacacctgtggtgctaacacctggggtggaggga

SEQ ID NO: 24554 - DNA, 122 bp, Homo sapiens
  misc_feature (61)..(62): /note="This region represents a CpG dinucleotide"
  misc_feature (61)..(61): /note="Nucleotide may be methylated to form 5-methylcytosine"
aaaatcctataatccatacaaccattaaatggcaataaatactaagcttactataaatcacgtactgtgctacatactgggaatttaaaaagaaaaaataaagattaaaacagagtccctac

SEQ ID NO: 24555 - DNA, 122 bp, Homo sapiens
  misc_feature (61)..(62): /note="This region represents a CpG dinucleotide"
  misc_feature (61)..(61): /note="Nucleotide may be methylated to form 5-methylcytosine"
gtgacactgcaggtggagcctacaaagtttgccaatatctgccttagtcaacaaacaacacgtccttggtcaaggcatattatatttttactgactcttgggctgttgacaatgttacctgg

SEQ ID NO: 24556 - DNA, 122 bp, Homo sapiens
  misc_feature (61)..(62): /note="This region represents a CpG dinucleotide"
  misc_feature (61)..(61): /note="Nucleotide may be methylated to form 5-methylcytosine"
cttgggacagaggaaccagggtggacttgctgatcagagtgcttggagtccttatctggtcgtctctttggtttagtacacaagttcctaagttcttctcagaggggaagtcagctgctcta

SEQ ID NO: 24557 - DNA, 122 bp, Homo sapiens
  misc_feature (61)..(62): /note="This region represents a CpG dinucleotide"
  misc_feature (61)..(61): /note="Nucleotide may be methylated to form 5-methylcytosine"
tacacgtgcacagacatgcatggatgtacgcacgcacacagacatgcatctgtgcacccacgtgcactccagatcaggctgcctggccttaactctggctcaaagagctgggtgactttgtg

SEQ ID NO: 24558 - DNA, 122 bp, Homo sapiens
  misc_feature (61)..(62): /note="This region represents a CpG dinucleotide"
  misc_feature (61)..(61): /note="Nucleotide may be methylated to form 5-methylcytosine"
aatacatcagtttggggacatctttatgataggaaatcttctaatcctcgtatgtctttccgcttatttgagtcttttttcttttctttttttttttttttttactttggagacagtgcctt

SEQ ID NO: 24559 - DNA, 122 bp, Homo sapiens
  misc_feature (61)..(62): /note="This region represents a CpG dinucleotide"
  misc_feature (61)..(61): /note="Nucleotide may be methylated to form 5-methylcytosine"
tccctcccagcccctgagtcatgaacagcaaggagtgtttgaagtttctgctttgaactccgtccagcctgatccctggcctgagcaacttcacaacagtaattgcactttaagacagccta

SEQ ID NO: 24560 - DNA, 122 bp, Homo sapiens
  misc_feature (61)..(62): /note="This region represents a CpG dinucleotide"
  misc_feature (61)..(61): /note="Nucleotide may be methylated to form 5-methylcytosine"
ctcaccacttttgttttcatctcggagactgcatatcgtgaattgcgtaagtcactgagacgaataaatcattgagagaagctaatcaatgtccctggaagtttatatttcatcttctctta

SEQ ID NO: 24561 - DNA, 122 bp, Homo sapiens
  misc_feature (61)..(62): /note="This region represents a CpG dinucleotide"
  misc_feature (61)..(61): /note="Nucleotide may be methylated to form 5-methylcytosine"
aaagtaaaccttgatttcttctttataactttgactaaggctgacccaatgactacctcacggcaggattcagttattgcaaaggaaagtggtataattgcacaatgcctcacgcaaatccc

SEQ ID NO: 24562 - DNA, 122 bp, Homo sapiens
  misc_feature (61)..(62): /note="This region represents a CpG dinucleotide"
  misc_feature (61)..(61): /note="Nucleotide may be methylated to form 5-methylcytosine"
caggagtcagcaatgcacagatgaggcccaacagagaattccccatgatgatggggacaccgctcagttgccaccaatgccttcttcagactagttcacaggtcatactatgcaaagccagg

SEQ ID NO: 24563 - DNA, 122 bp, Homo sapiens
  misc_feature (61)..(62): /note="This region represents a CpG dinucleotide"
  misc_feature (61)..(61): /note="Nucleotide may be methylated to form 5-methylcytosine"
ctcacacacacatcctacgaggacggctccaggaaccacaatgggcgaggagggctcgggcggccgctgattctcatgactctgtgggtctcaatgctccatgagaacgtagcccagctcat

SEQ ID NO: 24564 - DNA, 122 bp, Homo sapiens
  misc_feature (61)..(62): /note="This region represents a CpG dinucleotide"
  misc_feature (61)..(61): /note="Nucleotide may be methylated to form 5-methylcytosine"
tggcctctcccttctttcatacacaaaaagtagcatactcttgtcaggcgcggtggctcacgcctgggcaacaagagtgaaactctgtctcaggaaaaaaaaaaaaagtagcatactctcta

SEQ ID NO: 24565 - DNA, 122 bp, Homo sapiens
  misc_feature (61)..(62): /note="This region represents a CpG dinucleotide"
  misc_feature (61)..(61): /note="Nucleotide may be methylated to form 5-methylcytosine"
ttcaagtgattctcctgtctaagcctcctgagtagctgggattacaggcttgcaccaccacgcccagctaatgttcgtggttttaggagagagatggagtttcaccatgttggccagcctgg

SEQ ID NO: 24566 - DNA, 122 bp, Homo sapiens
  misc_feature (61)..(62): /note="This region represents a CpG dinucleotide"
  misc_feature (61)..(61): /note="Nucleotide may be methylated to form 5-methylcytosine"
cctccgcctcccgggttcaagtgattctcgtgcctcagccgtagtatctgggattacaggcgcacatcaacacattcggctaatttttgtatttttagtagagacagggtttcaccatgttg

SEQ ID NO: 24567 - DNA, 122 bp, Homo sapiens
  misc_feature (61)..(62): /note="This region represents a CpG dinucleotide"
  misc_feature (61)..(61): /note="Nucleotide may be methylated to form 5-methylcytosine"
ttacagcagagctccattctaaggcacttggctctcagttttctcagagtgaacatgcctcgtagcttgggtcctatggcaggagtgcaataggacatggatatgcatcacctgttctataa

SEQ ID NO: 24568 - DNA, 122 bp, Homo sapiens
  misc_feature (61)..(62): /note="This region represents a CpG dinucleotide"
  misc_feature (61)..(61): /note="Nucleotide may be methylated to form 5-methylcytosine"
gcatttaatagagtcttcatttgtgaaatatgataatgccttatgattcagaggaatatacgaaggaaatatatagaaatttaaggtaatgcagtttgaggtaaagctttttttcaagaggt

SEQ ID NO: 24569 - DNA, 122 bp, Homo sapiens
  misc_feature (61)..(62): /note="This region represents a CpG dinucleotide"
  misc_feature (61)..(61): /note="Nucleotide may be methylated to form 5-methylcytosine"
aaaacagccttccacagaagtcagacgctgagctacaggaacggctatgcaattgttcgacgtccaacagttgggataggcggagaccggctccagttcaaccagctgtcccaggctgagct

SEQ ID NO: 24570 - DNA, 122 bp, Homo sapiens
  misc_feature (61)..(62): /note="This region represents a CpG dinucleotide"
  misc_feature (61)..(61): /note="Nucleotide may be methylated to form 5-methylcytosine"
ggaaaagggtatacccacagggcaaacttgttttgcctcaaaacatactttatcatgtaacgtcccattcctcacccaaattagatagccttacattatcatgtgacatctgttaaataact

SEQ ID NO: 24571 - DNA, 122 bp, Homo sapiens
  misc_feature (61)..(62): /note="This region represents a CpG dinucleotide"
  misc_feature (61)..(61): /note="Nucleotide may be methylated to form 5-methylcytosine"
ctgggattataggcatgagccactgtgccccgcccagtctcaggtatttcttcatagcagcgtgaaaatgaactaatatgtatcccagaaccagaaaatgtgagagtaggaagacaatttac

SEQ ID NO: 24572 - DNA, 122 bp, Homo sapiens
  misc_feature (61)..(62): /note="This region represents a CpG dinucleotide"
  misc_feature (61)..(61): /note="Nucleotide may be methylated to form 5-methylcytosine"
aaagtccttgcgccccaggtctgaaagccaaggggagcctgtgtttgctcccagcggggtcgccggccgtctccacaacccttgcttcctacaggcagaattgaatgcaggagctggctgtc

SEQ ID NO: 24573 - DNA, 122 bp, Homo sapiens
  misc_feature (61)..(62): /note="This region represents a CpG dinucleotide"
  misc_feature (61)..(61): /note="Nucleotide may be methylated to form 5-methylcytosine"
actctgaagttgttatcctccttaagagatttttatttcagtgatacttctgtggaataccgttaatctcttctcatttaaaaccatgttttaaagatctccataaccaggtaaacctactt

SEQ ID NO: 24574 - DNA, 122 bp, Homo sapiens
  misc_feature (61)..(62): /note="This region represents a CpG dinucleotide"
  misc_feature (61)..(61): /note="Nucleotide may be methylated to form 5-methylcytosine"
caataacgaggcaaggaagggagggcaggcaccctctctggtgacacctccacactgtaccgaatgccaaatgcaggtggtgtgagcagggcgcactaacctgcctaaaaataaagcaccag

SEQ ID NO: 24575 - DNA, 122 bp, Homo sapiens
  misc_feature (61)..(62): /note="This region represents a CpG dinucleotide"
  misc_feature (61)..(61): /note="Nucleotide may be methylated to form 5-methylcytosine"
cttaatgttactccatttcaatccatttgtcttcttattttgctgtgtgagtcatcttgccgagttctgcagaggataatgtgataccctcagcacttaataagctggcagatacatttcca

SEQ ID NO: 24576 - DNA, 122 bp, Homo sapiens
  misc_feature (61)..(62): /note="This region represents a CpG dinucleotide"
  misc_feature (61)..(61): /note="Nucleotide may be methylated to form 5-methylcytosine"
caaacctcatcaactccatcttaattttcctcataccatagtcattcctgttctacaactcgcaaagaagttttacttctgcaaaaaaataatgaataactcttcactgtgttatgttttcc

SEQ ID NO: 24577 - DNA, 122 bp, Homo sapiens
  misc_feature (61)..(62): /note="This region represents a CpG dinucleotide"
  misc_feature (61)..(61): /note="Nucleotide may be methylated to form 5-methylcytosine"
aacaattgtgtatagaaattgctgaaaagggtggtttaaataaaacagaaaggagatattcggaattatttcactacctctgtgactgactgtgttttggagttttccttttccactgaaga

SEQ ID NO: 24578 - DNA, 122 bp, Homo sapiens
  misc_feature (61)..(62): /note="This region represents a CpG dinucleotide"
  misc_feature (61)..(61): /note="Nucleotide may be methylated to form 5-methylcytosine"
aattaaatgagaaatcataatccaaaatcccatgtgttccatgattacaaattatctatacgaacagatgaagactaaaaggaaatagcaacaaagatgacacaaatgcctggatgatttag

SEQ ID NO: 24579 - DNA, 122 bp, Homo sapiens
  misc_feature (61)..(62): /note="This region represents a CpG dinucleotide"
  misc_feature (61)..(61): /note="Nucleotide may be methylated to form 5-methylcytosine"
atttttatgctgaatggtggtaatggcttatgtcctgacaagtgtgtgtcaaatgattgtcgtgacagaatgatgtgtgtaggtacctgtccagtgtgtctctgtcttgcaaatctatagtt

SEQ ID NO: 24580 - DNA, 122 bp, Homo sapiens
  misc_feature (61)..(62): /note="This region represents a CpG dinucleotide"
  misc_feature (61)..(61): /note="Nucleotide may be methylated to form 5-methylcytosine"
tggatggtgtgaagcaatctgttttctagcccgagcctgcatagctggtggatcctggaccgtgattaagtgcatcacctaggcttcaatgagatggagtcactgtgtgtccaaacagtggg

SEQ ID NO: 24581 - DNA, 122 bp, Homo sapiens
  misc_feature (61)..(62): /note="This region represents a CpG dinucleotide"
  misc_feature (61)..(61): /note="Nucleotide may be methylated to form 5-methylcytosine"
attacttacaacattatttacgtacaataaagttgagacagccaaagtgaaatcttgttacgcaagcatgggcacttgttagatctaactacaaacactgctgtgtggtttttatctttaga

SEQ ID NO: 24582 - DNA, 122 bp, Homo sapiens
  misc_feature (61)..(62): /note="This region represents a CpG dinucleotide"
  misc_feature (61)..(61): /note="Nucleotide may be methylated to form 5-methylcytosine"
ttaaaagcttgctctttagactcaaacagttctggctttgaatttcagctgcagcacatgcgtgactttaaacttgtcatttaatgtctctgtgcttcagttgcttaggctgtacaatgggg

SEQ ID NO: 24583 - DNA, 122 bp, Homo sapiens
  misc_feature (61)..(62): /note="This region represents a CpG dinucleotide"
  misc_feature (61)..(61): /note="Nucleotide may be methylated to form 5-methylcytosine"
tgcgtgagcgtgtctgcatgaaacagagctttcttgttcttgaacttctggggcccgaggcgtccgaatgctcgaggaacgatgatctgcaaagcaggattccgcagcaagttggtgcccgc

SEQ ID NO: 24584 - DNA, 122 bp, Homo sapiens
  misc_feature (61)..(62): /note="This region represents a CpG dinucleotide"
  misc_feature (61)..(61): /note="Nucleotide may be methylated to form 5-methylcytosine"
gtgggtagtgcttatcagagatggaaataaaattgacaagagttgataatgtattagaagcggaggctaagagagaggtaagcaagataatcactaggtttctgacttgcataattgggcgg

SEQ ID NO: 24585 - DNA, 122 bp, Homo sapiens
  misc_feature (61)..(62): /note="This region represents a CpG dinucleotide"
  misc_feature (61)..(61): /note="Nucleotide may be methylated to form 5-methylcytosine"
actgtgtgtgcacaggcttgcctatgcactctcacataaaggctgtaaggacatggaaaacgtgtcatcactgggtatctggggtggaaaagggttgggtgatttttattttcttttttttg

SEQ ID NO: 24586 - DNA, 122 bp, Homo sapiens
  misc_feature (61)..(62): /note="This region represents a CpG dinucleotide"
  misc_feature (61)..(61): /note="Nucleotide may be methylated to form 5-methylcytosine"
tttttaaaatcccatgtcttctgaaactttctgtccatctgtttctgttgtgctgaactccgctttggtagcatgaaaaggaagaggcaagcagcagctggaataaaaaaagacattgttcc

SEQ ID NO: 24587 - DNA, 122 bp, Homo sapiens
  misc_feature (61)..(62): /note="This region represents a CpG dinucleotide"
  misc_feature (61)..(61): /note="Nucleotide may be methylated to form 5-methylcytosine"
tgcaagacagaacactgacaggaacaccccaattggagtgggtactaatgtgagccagggcgcttttatctttcttgaatgttaataaggaaagcaagctcagaggatggttttgaacactg

SEQ ID NO: 24588 - DNA, 122 bp, Homo sapiens
  misc_feature (61)..(62): /note="This region represents a CpG dinucleotide"
  misc_feature (61)..(61): /note="Nucleotide may be methylated to form 5-methylcytosine"
tgtaaaaagaggaccaaaaaagaaggccagaaataagaaaagtggtagcaaaatggaaagcgaggcctctccaaaggtatgtttttctaacttcaacttgggcttggagttggcttacatgc

SEQ ID NO: 24589 - DNA, 122 bp, Homo sapiens
  misc_feature (61)..(62): /note="This region represents a CpG dinucleotide"
  misc_feature (61)..(61): /note="Nucleotide may be methylated to form 5-methylcytosine"
gactgagtttgcagtccctgatgttatgggctgaacgtttttgtccccccaaaattcatacgctgaagccctgactcacgatgtgctagtatttggaggcagggcctttggaggtgatgagg

SEQ ID NO: 24590 - DNA, 122 bp, Homo sapiens
  misc_feature (61)..(62): /note="This region represents a CpG dinucleotide"
  misc_feature (61)..(61): /note="Nucleotide may be methylated to form 5-methylcytosine"
ggtttggccctcactggttggcttgtttacctgccatttacaaacaggtccttgatagctcgtagcagggagggacagcctgctgctgagcccagccccccagcaagtgggccttggacaca

SEQ ID NO: 24591 - DNA, 122 bp, Homo sapiens
  misc_feature (61)..(62): /note="This region represents a CpG dinucleotide"
  misc_feature (61)..(61): /note="Nucleotide may be methylated to form 5-methylcytosine"
gagtcagacgacacggcgtctgtaccagggagcttgggtttaatcttctgagccacgggacggcactgatgggttttaagccgtgtaaagacttgatccaatttgtgaattggatcatcctg

SEQ ID NO: 24592 - DNA, 122 bp, Homo sapiens
  misc_feature (61)..(62): /note="This region represents a CpG dinucleotide"
  misc_feature (61)..(61): /note="Nucleotide may be methylated to form 5-methylcytosine"
tcatcctgacgacagctgatgccaacctgaattcagccagtcaggattgagggcacttcacgttccagggagagcaaataaaatcctttggttaggccaggtgtggtggctcatgcctgtaa

SEQ ID NO: 24593 - DNA, 122 bp, Homo sapiens
  misc_feature (61)..(62): /note="This region represents a CpG dinucleotide"
  misc_feature (61)..(61): /note="Nucleotide may be methylated to form 5-methylcytosine"
gtgatggcttgtattgcctgtcacaggtgtgctgacccactgatgacatgtctgttccatcgttttcttaataaggtgtcaagcagccctgtgaaacaggtaaaggaaaaggcaagatgggt

SEQ ID NO: 24594 - DNA, 122 bp, Homo sapiens
  misc_feature (61)..(62): /note="This region represents a CpG dinucleotide"
  misc_feature (61)..(61): /note="Nucleotide may be methylated to form 5-methylcytosine"
ctagctccccacccccacccaaattccgtttccttctggtcctggcctcctgcttgcggccgtctccacccctcacatccatgggatcctgcacaggtccacggttggtaaaccgcttagct

SEQ ID NO: 24595 - DNA, 122 bp, Homo sapiens
  misc_feature (61)..(62): /note="This region represents a CpG dinucleotide"
  misc_feature (61)..(61): /note="Nucleotide may be methylated to form 5-methylcytosine"
actctaggccagtcatttctggttcctcctgctatgtctcatccagcatatcccagatgacgtgcaggaggttctaaagtaagaaaaaaaaaacctggccaggcacggtggctcaagccttt

SEQ ID NO: 24596 - DNA, 122 bp, Homo sapiens
  misc_feature (61)..(62): /note="This region represents a CpG dinucleotide"
  misc_feature (61)..(61): /note="Nucleotide may be methylated to form 5-methylcytosine"
ggagagtgggaatgtgaagagatgcgtaacatgcaacttagtaggaattttgatctgtttcgtgtttctctgggttgggcacagcttgacaggcttatatgtggatcaccacataccctcac

SEQ ID NO: 24597 - DNA, 122 bp, Homo sapiens
  misc_feature (61)..(62): /note="This region represents a CpG dinucleotide"
  misc_feature (61)..(61): /note="Nucleotide may be methylated to form 5-methylcytosine"
cctgcaggctgagctggggacactgcactatttatgtggtcaccggggcaacagggagctcgtctggagccttgggacgctatcggtggcagctgaggacaatgagatgaggcaggaagctg

SEQ ID NO: 24598 - DNA, 122 bp, Homo sapiens
  misc_feature (61)..(62): /note="This region represents a CpG dinucleotide"
  misc_feature (61)..(61): /note="Nucleotide may be methylated to form 5-methylcytosine"
tttgttggagaaactgggtagtctgtccagtagaggtatttgtttacttttgacagataacgcattcatgtgttataacattcaaaaggtacaacatagtaaagagtggaaaacttcctccc

SEQ ID NO: 24599 - DNA, 122 bp, Homo sapiens
  misc_feature (61)..(62): /note="This region represents a CpG dinucleotide"
  misc_feature (61)..(61): /note="Nucleotide may be methylated to form 5-methylcytosine"
gtcttttttttaatccaataaaactttcaactacaatcggtgctgatgtcaccatgttagcggcacacactcttgactctggtttgcacagttcacatggcaggtgggtccaccgcctccct

SEQ ID NO: 24600 - DNA, 122 bp, Homo sapiens
  misc_feature (61)..(62): /note="This region represents a CpG dinucleotide"
  misc_feature (61)..(61): /note="Nucleotide may be methylated to form 5-methylcytosine"
gaactatttaagtgagaaaactctgcctcttgcttttaaattagattgctctcacttactcgtaaacataggtattcttttatgggtgcttatcattccttctttcaataaatgtctgtttg

SEQ ID NO: 24601 - DNA, 122 bp, Homo sapiens
  misc_feature (61)..(62): /note="This region represents a CpG dinucleotide"
  misc_feature (61)..(61): /note="Nucleotide may be methylated to form 5-methylcytosine"
actagagccataaaatatgtctcacagtactaagactagatggagggcaaattttagctacggtcttaggaaactaacaacagacatatatgtatcaaagtggcagaacctcaggtcctggt

SEQ ID NO: 24602 - DNA, 122 bp, Homo sapiens
  misc_feature (61)..(62): /note="This region represents a CpG dinucleotide"
  misc_feature (61)..(61): /note="Nucleotide may be methylated to form 5-methylcytosine"
tcactgctccctaatctaacttgcagtcaacctgttttgactcctgaactctatgaagaacgtgcctgctttgaattttttgaaagcttcactccatttctagaggtcttcttgtatttttc

SEQ ID NO: 24603 - DNA, 122 bp, Homo sapiens
  misc_feature (61)..(62): /note="This region represents a CpG dinucleotide"
  misc_feature (61)..(61): /note="Nucleotide may be methylated to form 5-methylcytosine"
tgtacgtgttgcagtcctttcatttgccacaacatatggattccataaatgcagacatgccgaagtgcatctgtctgggtagttaacatgatctaaacatccctcttcgttccgctaactcc

SEQ ID NO: 24604 - DNA, 122 bp, Homo sapiens
  misc_feature (61)..(62): /note="This region represents a CpG dinucleotide"
  misc_feature (61)..(61): /note="Nucleotide may be methylated to form 5-methylcytosine"
tgaaacaggctgctgggacttacccagagtttctgattcagctgatctagggcagagtctcgctctgtcacccaggctggagtgcagtggcaccatctcgactcacttcaacctccgcctcc

SEQ ID NO: 24605 - DNA, 122 bp, Homo sapiens
  misc_feature (61)..(62): /note="This region represents a CpG dinucleotide"
  misc_feature (61)..(61): /note="Nucleotide may be methylated to form 5-methylcytosine"
gaaagttgttcacacttggtttcacctctcatcacatgctgagtattgaagccttactggcggtagctgacacagaaatgggtctgctatcagaatatgttcttagtaaatataaagtttga

SEQ ID NO: 24606 - DNA, 122 bp, Homo sapiens
  misc_feature (61)..(62): /note="This region represents a CpG dinucleotide"
  misc_feature (61)..(61): /note="Nucleotide may be methylated to form 5-methylcytosine"
tggcactcagtgcccatctgccggatctcctccgtcgtctccttcaggcatttctcagtccggccccagagaacaatctggaagaagataataacaacgcagaacaaatggtcattaagcca

SEQ ID NO: 24607 - DNA, 122 bp, Homo sapiens
  misc_feature (61)..(62): /note="This region represents a CpG dinucleotide"
  misc_feature (61)..(61): /note="Nucleotide may be methylated to form 5-methylcytosine"
ttgaagtaaggcgaattgaagtccgctggtctccagacaggcacggtaacgtgcacgcatcggatgtggttcccggggaatggtgggtgattgtccatcttcctaacagtcctcaaatgagg

SEQ ID NO: 24608 - DNA, 122 bp, Homo sapiens
  misc_feature (61)..(62): /note="This region represents a CpG dinucleotide"
  misc_feature (61)..(61): /note="Nucleotide may be methylated to form 5-methylcytosine"
ttaaacctgtttgggtggaaagatgttctgtttatgcctccccttctctctaggccttatcgctgcttccctccacctgcctgcagacagacttaatccggccggagccaagggtaaagggt

SEQ ID NO: 24609 - DNA, 122 bp, Homo sapiens
  misc_feature (61)..(62): /note="This region represents a CpG dinucleotide"
  misc_feature (61)..(61): /note="Nucleotide may be methylated to form 5-methylcytosine"
aggtctataaccacatattatatgagtgcctacttgaagccagatactctgctaagagtacgttatctgctctcattcaaccatcaccacaaaccccaagagatcaaggaactaggctcaca

SEQ ID NO: 24610 - DNA, 122 bp, Homo sapiens
  misc_feature (61)..(62): /note="This region represents a CpG dinucleotide"
  misc_feature (61)..(61): /note="Nucleotide may be methylated to form 5-methylcytosine"
agagtctattgtaacaagtttctttgtcttcatacagcacctgttactgtgcaacaagaccgtgtttttgaacacctggcataacatgaaactgttaggttatattgtggctaatcctgaag

SEQ ID NO: 24611 - DNA, 122 bp, Homo sapiens
  misc_feature (61)..(62): /note="This region represents a CpG dinucleotide"
  misc_feature (61)..(61): /note="Nucleotide may be methylated to form 5-methylcytosine"
actgtgctacagttttatttcctgctggcttctcagttctctaagccttgaggatccacgcgccttagaccattattacctcctcccccatatgcagtaagttcctgactcttctgatcttt

SEQ ID NO: 24612 - DNA, 122 bp, Homo sapiens
  misc_feature (61)..(62): /note="This region represents a CpG dinucleotide"
  misc_feature (61)..(61): /note="Nucleotide may be methylated to form 5-methylcytosine"
ccatccgtgcctcagggcccataaggataatttctccctaacacaaatgcgaatgggaaacgaggattaagcataccattcagagaagcaagtccatgatagagtccatataactgccttcc

SEQ ID NO: 24613 - DNA, 122 bp, Homo sapiens
  misc_feature (61)..(62): /note="This region represents a CpG dinucleotide"
  misc_feature (61)..(61): /note="Nucleotide may be methylated to form 5-methylcytosine"
gaaagccacaggaaaggaaagactggtcacagacttccttcttccctggaccatttgttacgggaagttctcaggaaacaggtcagtaagtgtagagggcatcacaggacaaacttcattgc

SEQ ID NO: 24614 - DNA, 122 bp, Homo sapiens
  misc_feature (61)..(62): /note="This region represents a CpG dinucleotide"
  misc_feature (61)..(61): /note="Nucleotide may be methylated to form 5-methylcytosine"
aagagaggaaggcttcccagatgcaggggaaaaagctctaagcctggctggagatgaatgcgttttgccaattcctggaaacaagaggcctgacatcatgagtaagacagaaactgtgtagg

SEQ ID NO: 24615 - DNA, 122 bp, Homo sapiens
  misc_feature (61)..(62): /note="This region represents a CpG dinucleotide"
  misc_feature (61)..(61): /note="Nucleotide may be methylated to form 5-methylcytosine"
tcagcatttctgtctctgtcaaacaattagtttatagatagtcataatctttctttcttccggatggtttatccttgtatgctgaacaaaagaaaaaatgtgaagactgaaaggtgtgattt

SEQ ID NO: 24616 - DNA, 122 bp, Homo sapiens
  misc_feature (61)..(62): /note="This region represents a CpG dinucleotide"
  misc_feature (61)..(61): /note="Nucleotide may be methylated to form 5-methylcytosine"
gtgtgtatgtgtgcctatgggtgtacatgtgcatgtgtgtgcacaagtatgtatgtgaaacgatgctgattaaacaggatgattatccaataccaatcaacttggataatctgattatccaa

SEQ ID NO: 24617 - DNA, 122 bp, Homo sapiens
  misc_feature (61)..(62): /note="This region represents a CpG dinucleotide"
  misc_feature (61)..(61): /note="Nucleotide may be methylated to form 5-methylcytosine"
cagctgtaacaaactactgcaaacttcatggcttaaaacaatgcaaatttgtcctcttaccgtcccagaggttggaagtttgaaatgggtcttatgagctaaaatcaagatgtgggcagggc

SEQ ID NO: 24618 - DNA, 122 bp, Homo sapiens
  misc_feature (61)..(62): /note="This region represents a CpG dinucleotide"
  misc_feature (61)..(61): /note="Nucleotide may be methylated to form 5-methylcytosine"
agacatcacagatagccaataaatgaagtcaggtatgatatgcatggtttaggctttcctcggtggttaaacaggccttttggaggcctagggttagcttgaatgtcagtccacattgcatg

SEQ ID NO: 24619 - DNA, 122 bp, Homo sapiens
  misc_feature (61)..(62): /note="This region represents a CpG dinucleotide"
  misc_feature (61)..(61): /note="Nucleotide may be methylated to form 5-methylcytosine"
ttttgatgagttcagttgttttgggggatggaaaggcgttttctggttaggaatgatgaacgggttggtttgctacttaggtaagtaagaagaaggggaactaatgagtaattgttgcacaa

SEQ ID NO: 24620 - DNA, 122 bp, Homo sapiens
  misc_feature (61)..(62): /note="This region represents a CpG dinucleotide"
  misc_feature (61)..(61): /note="Nucleotide may be methylated to form 5-methylcytosine"
tgctgtcagacagtcactgcacagataactatgcaaccacaatgacagctttgaagcggccgtggcgatagggcaaccccatccagcctgggcctttaggggagtgtcaaggaagagctctc

SEQ ID NO: 24621 - DNA, 122 bp, Homo sapiens
  misc_feature (61)..(62): /note="This region represents a CpG dinucleotide"
  misc_feature (61)..(61): /note="Nucleotide may be methylated to form 5-methylcytosine"
cttagaaagtgccccctctatgggactcctgacagattgttggatattcatttacaaattcgtattttcactttttaagctttttagaacttctgatctctagattaattttataaactttt

SEQ ID NO: 24622 - DNA, 122 bp, Homo sapiens
  misc_feature (61)..(62): /note="This region represents a CpG dinucleotide"
  misc_feature (61)..(61): /note="Nucleotide may be methylated to form 5-methylcytosine"
gctggggctcctttctattctgttaaaaagccctgacccagagaactcaggactttctggcgcaaaatggtctgatacagattttgttgctgtctcagattcacgcacttgctttggttcgt

SEQ ID NO: 24623 - DNA, 122 bp, Homo sapiens
  misc_feature (61)..(62): /note="This region represents a CpG dinucleotide"
  misc_feature (61)..(61): /note="Nucleotide may be methylated to form 5-methylcytosine"
gtagtccagagagcagtgtgtgccaccctcccagatttctctgattccttggagcaaagtcgcttaattgggagtcagcacagcctcctccctcattagcactggcctgcagtgacaggccc

SEQ ID NO: 24624 - DNA, 122 bp, Homo sapiens
  misc_feature (61)..(62): /note="This region represents a CpG dinucleotide"
  misc_feature (61)..(61): /note="Nucleotide may be methylated to form 5-methylcytosine"
aagcaggtttgctgtgcgctggtgaccaaactgagttaggaaagacagaacacacacatacgcaacacgtcatagaaagcaggtttattactcacagacaggcaatgagggacaacagaagc

SEQ ID NO: 24625 - DNA, 122 bp, Homo sapiens
  misc_feature (61)..(62): /note="This region represents a CpG dinucleotide"
  misc_feature (61)..(61): /note="Nucleotide may be methylated to form 5-methylcytosine"
agtcatgataacatgtaggatgcttagggtaaactctaaactcacaatcactaagggcaacgcaacagagaaagtgatttgggaagacagcagcaacaagagacctccataaagaaggctct

SEQ ID NO: 24626 - DNA, 122 bp, Homo sapiens
  misc_feature (61)..(62): /note="This region represents a CpG dinucleotide"
  misc_feature (61)..(61): /note="Nucleotide may be methylated to form 5-methylcytosine"
tccctgggagcccttcagccaagggcgtgtgtgggctgaggcgtggcatgcacgggtcggcgagacagcagccatctgaacctgtcctcctcctccatctctacctcacctccaccatctcc

SEQ ID NO: 24627 - DNA, 122 bp, Homo sapiens
  misc_feature (61)..(62): /note="This region represents a CpG dinucleotide"
  misc_feature (61)..(61): /note="Nucleotide may be methylated to form 5-methylcytosine"
catgggggcctcctgactctgacattctacgagcctatgacacaccctttgtgtggtggacgctgtattgaattcaagtctctaagttacacagtgctctggagctctcaagggagaatttt

SEQ ID NO: 24628 - DNA, 122 bp, Homo sapiens
  misc_feature (61)..(62): /note="This region represents a CpG dinucleotide"
  misc_feature (61)..(61): /note="Nucleotide may be methylated to form 5-methylcytosine"
aaaagtgtcttcaattttaaataatttgagaatacttacctggttagtaggctaaactaacgtagtagggaagagagtgtaagaaaagtgctgttgaattcatcattcccattagcaccagt

SEQ ID NO: 24629 - DNA, 122 bp, Homo sapiens
  misc_feature (61)..(62): /note="This region represents a CpG dinucleotide"
  misc_feature (61)..(61): /note="Nucleotide may be methylated to form 5-methylcytosine"
ggaggcagccttctcgtttccatcacaggaagccattgctgtcaatgtgtgtctgaataccgtttattcccttcttgagtaatttcacttatttccctacacaatgtaaacatggaaaccaa

SEQ ID NO: 24630 - DNA, 122 bp, Homo sapiens
  misc_feature (61)..(62): /note="This region represents a CpG dinucleotide"
  misc_feature (61)..(61): /note="Nucleotide may be methylated to form 5-methylcytosine"
catggagaaacccagtgtgaaacagtatgattgtttctgggaggtaccaatgacatataacgtgggagaatgtgacttcactgaactggaagctatgctcctcaaagggtggttactcatac

SEQ ID NO: 24631 - DNA, 122 bp, Homo sapiens
  misc_feature (61)..(62): /note="This region represents a CpG dinucleotide"
  misc_feature (61)..(61): /note="Nucleotide may be methylated to form 5-methylcytosine"
gctatacccagactcggtcattattcagccctgtccacatctgaagactcaagttctaaccgttactttcagattgcaacactctagtcttcctcttttctcactcagcttctcctgctaca

SEQ ID NO: 24632 - DNA, 122 bp, Homo sapiens
  misc_feature (61)..(62): /note="This region represents a CpG dinucleotide"
  misc_feature (61)..(61): /note="Nucleotide may be methylated to form 5-methylcytosine"
ctaatctgccttgctcccaattaagtgggagaatgtaagttcttaatacaaagcagtcagcgttatctgggcagcacaggattaagagtgcaggctctggaatctggcagcctagcttctac

SEQ ID NO: 24633 - DNA, 122 bp, Homo sapiens
  misc_feature (61)..(62): /note="This region represents a CpG dinucleotide"
  misc_feature (61)..(61): /note="Nucleotide may be methylated to form 5-methylcytosine"
ttattttccatttctcctttcgttgttggcgaatatcaatgaagtgtgagcagcatcaaccgcaggagtaccaactgggaatcaccctgaccgagccttgcttcctttgagcaccgggagat

SEQ ID NO: 24634 - DNA, 122 bp, Homo sapiens
  misc_feature (61)..(62): /note="This region represents a CpG dinucleotide"
  misc_feature (61)..(61): /note="Nucleotide may be methylated to form 5-methylcytosine"
gagtgagtcaggcgatggtgagcctccgtgccagaacaacttgtaggctgtggaagcaaccgcaaagggatggcagcggtgatatatatagttgaaagatcactgtctgctgtgtagaggat

SEQ ID NO: 24635 - DNA, 122 bp, Homo sapiens
  misc_feature (61)..(62): /note="This region represents a CpG dinucleotide"
  misc_feature (61)..(61): /note="Nucleotide may be methylated to form 5-methylcytosine"
caacttgtgtccttcctgtcacttatctgaagttcatttgaatttggtgattttattttacgtggcctatgtatttggctaatgtttcatcattttatatgtcaaggaggaagactattaat

SEQ ID NO: 24636 - DNA, 122 bp, Homo sapiens
  misc_feature (61)..(62): /note="This region represents a CpG dinucleotide"
  misc_feature (61)..(61): /note="Nucleotide may be methylated to form 5-methylcytosine"
tctatatggactgaatctgaaagtgctgctgctcttagttccccaaacagatgtcctcaacgcctctgcctgcagctttttggctttttgagttccatcaagataagcaaccctcttcaggg

SEQ ID NO: 24637 - DNA, 122 bp, Homo sapiens
  misc_feature (61)..(62): /note="This region represents a CpG dinucleotide"
  misc_feature (61)..(61): /note="Nucleotide may be methylated to form 5-methylcytosine"
tgagattggggctccctagccagaaagaccaaggtacatttcagtgttggaacttttagccgtaccctcatcccaccttacctccggaaaggggagagggactagaggttgagttattcacc

SEQ ID NO: 24638 - DNA, 122 bp, Homo sapiens
  misc_feature (61)..(62): /note="This region represents a CpG dinucleotide"
  misc_feature (61)..(61): /note="Nucleotide may be methylated to form 5-methylcytosine"
attgttttaaagatttctataatggctgctatttgatagctgtatttgttgagtttgctacggttatcaaatatttatggagcacccattcatttgcggtgaggagttattttaaaatgttt

SEQ ID NO: 24639 - DNA, 122 bp, Homo sapiens
  misc_feature (61)..(62): /note="This region represents a CpG dinucleotide"
  misc_feature (61)..(61): /note="Nucleotide may be methylated to form 5-methylcytosine"
agaaaaatatcactttgggtacttaattggttgtagaaagactgcctgttaagaaccacacgtgatgggaacaaaggacactacacgctaaagaaggaaagggaagaaactcaaataaggag

SEQ ID NO: 24640 - DNA, 122 bp, Homo sapiens
  misc_feature (61)..(62): /note="This region represents a CpG dinucleotide"
  misc_feature (61)..(61): /note="Nucleotide may be methylated to form 5-methylcytosine"
agggacagccgattacatctttccaataaacccgagtttcatcgccgaactgccacacaacgcgaaacacccgaccctctctaataactgggctaatgaagaggcgtccgggtggcaggagg

SEQ ID NO: 24641 - DNA, 122 bp, Homo sapiens
  misc_feature (61)..(62): /note="This region represents a CpG dinucleotide"
  misc_feature (61)..(61): /note="Nucleotide may be methylated to form 5-methylcytosine"
taagcaacaggctgcaattacttcatctgggccaagtcagccagggcactgagagagcttcggcctttgtccaggccttggaaatgcaaccaaaaggacaggtgaggctcacgaagatgttt

SEQ ID NO: 24642 - DNA, 122 bp, Homo sapiens
  misc_feature (61)..(62): /note="This region represents a CpG dinucleotide"
  misc_feature (61)..(61): /note="Nucleotide may be methylated to form 5-methylcytosine"
tccttccactccccttcccaagggcttctcccatgtgggctttcaatgtgcagggcccctcggcctactgtcctcatgtacattatggatctggtatgtgtagtctcccatgtcacaatctt

SEQ ID NO: 24643 - DNA, 122 bp, Homo sapiens
  misc_feature (61)..(62): /note="This region represents a CpG dinucleotide"
  misc_feature (61)..(61): /note="Nucleotide may be methylated to form 5-methylcytosine"
ttgcctgcctctgtgagcgctgtagacctcatatgaggactgctattgttagaggagaagcgtcctgagagactctgctggacttaagtgtggcgagatacatatctgtttcttggagtttc

SEQ ID NO: 24644 - DNA, 122 bp, Homo sapiens
  misc_feature (61)..(62): /note="This region represents a CpG dinucleotide"
  misc_feature (61)..(61): /note="Nucleotide may be methylated to form 5-methylcytosine"
atgtcattcctgtccccaacatttcagatccccctctcctgctatgtatttgctccacagcgcttgccaccactgggcacgtgagacagttatttgtcaagtttatggcccggctatttact

SEQ ID NO: 24645 - DNA, 122 bp, Homo sapiens
  misc_feature (61)..(62): /note="This region represents a CpG dinucleotide"
  misc_feature (61)..(61): /note="Nucleotide may be methylated to form 5-methylcytosine"
tttgtaacctattttatactacaatgaaccattattccacataatcaattacattctatccgtttgtttctagtaaggtaaagtcttttgttgcacaatagttagacatttaggtagattcc

SEQ ID NO: 24646 - DNA, 122 bp, Homo sapiens
  misc_feature (61)..(62): /note="This region represents a CpG dinucleotide"
  misc_feature (61)..(61): /note="Nucleotide may be methylated to form 5-methylcytosine"
ggagataacaacatcttattttcagtctgaatcatttctcatgacctgttcatttttagccgcatgctcattcttctgtataccatagtcataggtttttgttcatctctgcactgccctgc

SEQ ID NO: 24647 - DNA, 122 bp, Homo sapiens
  misc_feature (61)..(62): /note="This region represents a CpG dinucleotide"
  misc_feature (61)..(61): /note="Nucleotide may be methylated to form 5-methylcytosine"
gctagatctcagctgggagcaactgaacagggtattccgcaaacacctcactggagtttgcgctcctcaactccatgactgcttcatggttgaatgcttcccggggcctctcagaggtagaa

SEQ ID NO: 24648 - DNA, 122 bp, Homo sapiens
  misc_feature (61)..(62): /note="This region represents a CpG dinucleotide"
  misc_feature (61)..(61): /note="Nucleotide may be methylated to form 5-methylcytosine"
ctggtgccgctctccccagcagtgcaggacaaaagccaggggaggaagagatggcttagacgcccgggtccctccgcggcctcctcctgaaaggctcacaaagcgctcctttattctcccca

SEQ ID NO: 24649 - DNA, 122 bp, Homo sapiens
  misc_feature (61)..(62): /note="This region represents a CpG dinucleotide"
  misc_feature (61)..(61): /note="Nucleotide may be methylated to form 5-methylcytosine"
gtgcctttaatggcaccttttttcttgctttttgaacaagggccttgcattttctttttgcgctcagccccacaaatcatgtagccagttttgcatgtaactctgttctcttttctgcagtc

SEQ ID NO: 24650 - DNA, 122 bp, Homo sapiens
  misc_feature (61)..(62): /note="This region represents a CpG dinucleotide"
  misc_feature (61)..(61): /note="Nucleotide may be methylated to form 5-methylcytosine"
ccccagccccagccccagccgagcacccccggccccgcctgcccggcgttcccttttgtgcggcgctctcccgtccgcatccgcccgatcctctggaactccccgcggacgccggggtccct

SEQ ID NO: 24651 - DNA, 122 bp, Homo sapiens
  misc_feature (61)..(62): /note="This region represents a CpG dinucleotide"
  misc_feature (61)..(61): /note="Nucleotide may be methylated to form 5-methylcytosine"
gcacactgtgcaaggctgtgggttacataagtccatatgtgaaggcggtcttgccacaggcgatggttcaatattgctgtggggagaacaactgcccatatctccctgaggtctcaaggcta

SEQ ID NO: 24652 - DNA, 122 bp, Homo sapiens
  misc_feature (61)..(62): /note="This region represents a CpG dinucleotide"
  misc_feature (61)..(61): /note="Nucleotide may be methylated to form 5-methylcytosine"
acttgttctaccctggtttgaggagtctgactgctctgagcctctgctcccctcccaagacgaggagatcagcactcggagacccgggagaggctgggctggctccctggccaggaggactc

SEQ ID NO: 24653 - DNA, 122 bp, Homo sapiens
  misc_feature (61)..(62): /note="This region represents a CpG dinucleotide"
  misc_feature (61)..(61): /note="Nucleotide may be methylated to form 5-methylcytosine"
tagatagccctgttggccacagctaagggtaacctgagggctggtggagaatcaatcgaacgcagtcagcagctgattcttgttatttatctttctgttatttatttaagctatgatttatt

SEQ ID NO: 24654 - DNA, 122 bp, Homo sapiens
  misc_feature (61)..(62): /note="This region represents a CpG dinucleotide"
  misc_feature (61)..(61): /note="Nucleotide may be methylated to form 5-methylcytosine"
ctataaaacaagataaaaataagtgggcaaactagtatgacgttaaagagaaggaaaatacgaaaccagaacagtgtgacaaatcggccaaccagaggattttatagtgtttttgagatcaa

SEQ ID NO: 24655 - DNA, 122 bp, Homo sapiens
  misc_feature (61)..(62): /note="This region represents a CpG dinucleotide"
  misc_feature (61)..(61): /note="Nucleotide may be methylated to form 5-methylcytosine"
aagcagtgcaatgaagcttgaatagatcagaagaaactaaaaccccagctcggtagatgccgatactggtttgcatggaggagttattttgctaaaaggaagtaaaaccgcttcgtgaaatg

SEQ ID NO: 24656 - DNA, 122 bp, Homo sapiens
  misc_feature (61)..(62): /note="This region represents a CpG dinucleotide"
  misc_feature (61)..(61): /note="Nucleotide may be methylated to form 5-methylcytosine"
ctgcttctgaaaatttctttcaccacttaacccattgcctagtgtattagtctattctcacgctgctaaatacaaagaaatatctgagactgggtaatttagaaagaagagaggattaattg

SEQ ID NO: 24657 - DNA, 122 bp, Homo sapiens
  misc_feature (61)..(62): /note="This region represents a CpG dinucleotide"
  misc_feature (61)..(61): /note="Nucleotide may be methylated to form 5-methylcytosine"
gtccccaggaaggctagcccaactaagtttagaaaggagaagagcagttgggcaatgtggcgtcctggccagtcaatgtgtgccgattgtttatgagcaacactcaagttgatgttacaagc

SEQ ID NO: 24658 - DNA, 122 bp, Homo sapiens
  misc_feature (61)..(62): /note="This region represents a CpG dinucleotide"
  misc_feature (61)..(61): /note="Nucleotide may be methylated to form 5-methylcytosine"
taggaggccttctctgacctccccaaatcagagataggaggagcacttcctgtgtgttcccgtagaacctggcactgcccatgtgagagcccctatcactctagaatacatttttctattat

SEQ ID NO: 24659 - DNA, 122 bp, Homo sapiens
  misc_feature (61)..(62): /note="This region represents a CpG dinucleotide"
  misc_feature (61)..(61): /note="Nucleotide may be methylated to form 5-methylcytosine"
ccactgagtcaccggcgctcggggaggggccaggtccactgccagttgaatctggttctgcggtcgcttgctttggggaactcaggcaagcgtcctgaacacttcaaaacctcccaatgatc

SEQ ID NO: 24660 - DNA, 122 bp, Homo sapiens
  misc_feature (61)..(62): /note="This region represents a CpG dinucleotide"
  misc_feature (61)..(61): /note="Nucleotide may be methylated to form 5-methylcytosine"
ctgtgctgggggtttggctaggttaacacaaacccaaccaccaggtacagcaggtgttgtcgtcacaatcctgggaaggaaataaggtacacaaaggttaagtaacgtctgatgtctcttgt

SEQ ID NO: 24661 - DNA, 122 bp, Homo sapiens
  misc_feature (61)..(62): /note="This region represents a CpG dinucleotide"
  misc_feature (61)..(61): /note="Nucleotide may be methylated to form 5-methylcytosine"
ctttgggaagttacttaacctctctgtttcgtcatttgtaccttagaatgttgctgtgagcgttaaactacagtgcccagcacacagtaacagtttaatagatgttagctgtttttattgct

SEQ ID NO: 24662 - DNA, 122 bp, Homo sapiens
  misc_feature (61)..(62): /note="This region represents a CpG dinucleotide"
  misc_feature (61)..(61): /note="Nucleotide may be methylated to form 5-methylcytosine"
gcttgcacaacctgtaagcgcttttgtaatctgcgggcacggctctcaatgtcagcctgtcgccgcagtaaagctgttatccttgtgtcagaatctaaagcactgaaaagaatggaagacag

SEQ ID NO: 24663 - DNA, 122 bp, Homo sapiens
  misc_feature (61)..(62): /note="This region represents a CpG dinucleotide"
  misc_feature (61)..(61): /note="Nucleotide may be methylated to form 5-methylcytosine"
ggcaatcaaggttgtccttgccatgttttgactttaattggagtgcttctagcactgcctcggtaaacatgatactgagttttggaggtcagggaaatatttagctgctcatatgttattga

SEQ ID NO: 24664 - DNA, 122 bp, Homo sapiens
  misc_feature (61)..(62): /note="This region represents a CpG dinucleotide"
  misc_feature (61)..(61): /note="Nucleotide may be methylated to form 5-methylcytosine"
cagcgcttggaatagcatgaggtgtggaaaggagctgacgtgctcacctcatcagtaaggcggcacagcatgctggcactagtatgggctttgcaaacagtcagacttgggtccaaatctct

SEQ ID NO: 24665 - DNA, 122 bp, Homo sapiens
  misc_feature (61)..(62): /note="This region represents a CpG dinucleotide"
  misc_feature (61)..(61): /note="Nucleotide may be methylated to form 5-methylcytosine"
ctgagtacagagctgtcagggtcttgctttcttgacatacccagcaagaacatgcagggacgctcagggcccatagcaaactggttctgccaacagttatataataacttgttcactgtctc

SEQ ID NO: 24666 - DNA, 122 bp, Homo sapiens
  misc_feature (61)..(62): /note="This region represents a CpG dinucleotide"
  misc_feature (61)..(61): /note="Nucleotide may be methylated to form 5-methylcytosine"
gctcaataacaagttattcttagtaagcttggatggctagaggaagataattgataaagtcggtttaggagcagcagtgacagtgggtgcttcttgattcaaaaaagaaaatcatcattttg

SEQ ID NO: 24667 - DNA, 122 bp, Homo sapiens
  misc_feature (61)..(62): /note="This region represents a CpG dinucleotide"
  misc_feature (61)..(61): /note="Nucleotide may be methylated to form 5-methylcytosine"
ggaaactagccacttgagaaggaagctcagcttttctgggctttagaggagatggagacacgttggaaattcccgtaaccaataggctggggtgggagggtgttcttcccacacacacacaa

SEQ ID NO: 24668 - DNA, 122 bp, Homo sapiens
  misc_feature (61)..(62): /note="This region represents a CpG dinucleotide"
  misc_feature (61)..(61): /note="Nucleotide may be methylated to form 5-methylcytosine"
tgccatgaagatgaaggactgtacgaggaggagcctcccaccggggtgagcttaaatttgcggaaatatagaaagtcccgccccacccaactctgaccctggggcctcttgcagcagtatca

SEQ ID NO: 24669 - DNA, 122 bp, Homo sapiens
  misc_feature (61)..(62): /note="This region represents a CpG dinucleotide"
  misc_feature (61)..(61): /note="Nucleotide may be methylated to form 5-methylcytosine"
ttcccttcttcttctgctcccacctagggagaaaactgggctgtttggtaaaagccttggcggcagaacgtgtgcatttgcctgatctcttcaaggctccccaagccacactcctcagagac

SEQ ID NO: 24670 - DNA, 122 bp, Homo sapiens
  misc_feature (61)..(62): /note="This region represents a CpG dinucleotide"
  misc_feature (61)..(61): /note="Nucleotide may be methylated to form 5-methylcytosine"
agtggaatctgacaacctacaggccaggtaccgtgctgagtgcccagcaaaggcagtgagcgtgctattttggagatagcatccttttgtttaaggcgcattcaatcccctacaatgtatga

SEQ ID NO: 24671 - DNA, 122 bp, Homo sapiens
  misc_feature (61)..(62): /note="This region represents a CpG dinucleotide"
  misc_feature (61)..(61): /note="Nucleotide may be methylated to form 5-methylcytosine"
gcatatgggtgtctgacaataaacccccaacacctctcaatgcaggagaaagctccatgccggcaactgactaagaggagccacccagagcttttttgaatctgaggccaaggccagagggc

SEQ ID NO: 24672 - DNA, 122 bp, Homo sapiens
  misc_feature (61)..(62): /note="This region represents a CpG dinucleotide"
  misc_feature (61)..(61): /note="Nucleotide may be methylated to form 5-methylcytosine"
aacttcaattattacgcaaggtattgaattccgcctatgaaatctatgaaggtcattgcccgtggacttagaagtgcctagcagagttgaatggtatgtgggctgtgtgtgtatgatccata

SEQ ID NO: 24673 - DNA, 122 bp, Homo sapiens
  misc_feature (61)..(62): /note="This region represents a CpG dinucleotide"
  misc_feature (61)..(61): /note="Nucleotide may be methylated to form 5-methylcytosine"
ctggtttcctgtgctgtgagctgggtgcttattcagctgccttggcttcggtgggcttgccgcacagcgtatttttgtttccgaactattttggccctggaaggatgtctggcctcgtttca

SEQ ID NO: 24674 - DNA, 122 bp, Homo sapiens
  misc_feature (61)..(62): /note="This region represents a CpG dinucleotide"
  misc_feature (61)..(61): /note="Nucleotide may be methylated to form 5-methylcytosine"
ccagtctctactaggggctttataaccacactcactggaacaaatgtgtattcagagacccgcttcacaacaccgttcaaataacacatcagtgaggccttcagcaagaaaaacacttcgct

SEQ ID NO: 24675 - DNA, 122 bp, Homo sapiens
  misc_feature (61)..(62): /note="This region represents a CpG dinucleotide"
  misc_feature (61)..(61): /note="Nucleotide may be methylated to form 5-methylcytosine"
tggggatattgggatccctgtctcagtgcggcaacatgggaggcatctagtgcgacagagcggcctcacccaagtgatgtgtcatgatgaggataatgttcatggagactgatttccatttg

SEQ ID NO: 24676 - DNA, 122 bp, Homo sapiens
  misc_feature (61)..(62): /note="This region represents a CpG dinucleotide"
  misc_feature (61)..(61): /note="Nucleotide may be methylated to form 5-methylcytosine"
tcacccaggcgtgtgtgtgtgcgcgcccccacgcccctgcccacaggcctgcattgaaggcgcttccgctccccggagagccctgtcctgatgacccaccctctgctcattttcatgtgatt

SEQ ID NO: 24677 - DNA, 122 bp, Homo sapiens
  misc_feature (61)..(62): /note="This region represents a CpG dinucleotide"
  misc_feature (61)..(61): /note="Nucleotide may be methylated to form 5-methylcytosine"
agcaaagtataatgagtgactcttgatgcaaaataaacagaacacatggtttcaattacccgccaaataactttaaattgtttaaattatgtgagtatggttaaacttcaacaaattattta

SEQ ID NO: 24678 - DNA, 122 bp, Homo sapiens
  misc_feature (61)..(62): /note="This region represents a CpG dinucleotide"
  misc_feature (61)..(61): /note="Nucleotide may be methylated to form 5-methylcytosine"
ctcatctcatgacctctgcagcaagaagtcgagaacttcaaaaaggtcaatatgatcagccgggagcagtttgacacactgacccctgagccccctgtggatcccaaccaggaagttcctcc

SEQ ID NO: 24679 - DNA, 122 bp, Homo sapiens
  misc_feature (61)..(62): /note="This region represents a CpG dinucleotide"
  misc_feature (61)..(61): /note="Nucleotide may be methylated to form 5-methylcytosine"
taaatacgtttggaaaataaggaatctccatccctcttaacctttgttctcagtgactcacgtaataccagtgtattagtaatgttttaattatccctggaattcaaaattagggaccgtcc

SEQ ID NO: 24680 - DNA, 122 bp, Homo sapiens
  misc_feature (61)..(62): /note="This region represents a CpG dinucleotide"
  misc_feature (61)..(61): /note="Nucleotide may be methylated to form 5-methylcytosine"
ccaggggactcagtaaacaagcagaaaattcttgtccctgggagctgtgcggggatcgtgcgtttggtgaggaattttcctctgtgcaagctggaggggaaacacagagattccaccctggt

SEQ ID NO: 24681 - DNA, 122 bp, Homo sapiens
  misc_feature (61)..(62): /note="This region represents a CpG dinucleotide"
  misc_feature (61)..(61): /note="Nucleotide may be methylated to form 5-methylcytosine"
gcaagccccaggggaacagaaaccaaagtgatctgcattaaaaatgaaagcaactgaagacgacaaaccaagctttagaagcagctggagagatttactgagcttctcagcagaactagatg

SEQ ID NO: 24682 - DNA, 122 bp, Homo sapiens
  misc_feature (61)..(62): /note="This region represents a CpG dinucleotide"
  misc_feature (61)..(61): /note="Nucleotide may be methylated to form 5-methylcytosine"
ccagaaagttccctgtggggacatggtcaaattgtggtcaatgtaaagaccacagttaagcgagggagggaacaactcaataaaatctgttagagtcttttacactgaactttcctggcatc

SEQ ID NO: 24683 - DNA, 122 bp, Homo sapiens
  misc_feature (61)..(62): /note="This region represents a CpG dinucleotide"
  misc_feature (61)..(61): /note="Nucleotide may be methylated to form 5-methylcytosine"
ccacctgagtgtcttccaacagcatggggcaaatttttagggtagccagcaactctctcacgcatcacagtagccagtactgtgcaatccagaaaacagggaggtttcattgctgggagttt

SEQ ID NO: 24684 - DNA, 122 bp, Homo sapiens
  misc_feature (61)..(62): /note="This region represents a CpG dinucleotide"
  misc_feature (61)..(61): /note="Nucleotide may be methylated to form 5-methylcytosine"
accacagctagctgcctctgggaccgcccccgtgagtgcactgcgtcggcgcgaggcaggcgtccaactccaccccgccgcctcccacaccttggcgccggtgcttcgttcccggagtcggc

SEQ ID NO: 24685 - DNA, 122 bp, Homo sapiens
  misc_feature (61)..(62): /note="This region represents a CpG dinucleotide"
  misc_feature (61)..(61): /note="Nucleotide may be methylated to form 5-methylcytosine"
ggtaaggcctggcaatcagtagttatcaagttcccccaggtgattctaatacccattaagcgttaagaagccacacctgacatacgttaagtctttaacgctcaggattagtgatcattcag

SEQ ID NO: 24686 - DNA, 122 bp, Homo sapiens
  misc_feature (61)..(62): /note="This region represents a CpG dinucleotide"
  misc_feature (61)..(61): /note="Nucleotide may be methylated to form 5-methylcytosine"
aagtcactcagcccttggggacctcagctgcttcttacaggaaatgagtagggttgattacgtaacctctgaagtcctgtgactaggttttcagaatatttcttcctactgagaatcttaat

SEQ ID NO: 24687 - DNA, 122 bp, Homo sapiens
  misc_feature (61)..(62): /note="This region represents a CpG dinucleotide"
  misc_feature (61)..(61): /note="Nucleotide may be methylated to form 5-methylcytosine"
tcacggcacgtgtgtgggtgtcttgattgacaccacacaactccctgcttttaaagggcacgatcccgtggtttttagtgtattccgagttgagcaaccgttatcacgattgacgcgagcat

SEQ ID NO: 24688 - DNA, 122 bp, Homo sapiens
  misc_feature (61)..(62): /note="This region represents a CpG dinucleotide"
  misc_feature (61)..(61): /note="Nucleotide may be methylated to form 5-methylcytosine"
catgtggcccaagaaggtatgtccagcttcctccttgcatcttgcggcacaacacctttgcggtatggtgcctgggcagtcccgggttgttaagggtgagagttctaaagccaggctgcccg

SEQ ID NO: 24689 - DNA, 122 bp, Homo sapiens
  misc_feature (61)..(62): /note="This region represents a CpG dinucleotide"
  misc_feature (61)..(61): /note="Nucleotide may be methylated to form 5-methylcytosine"
gacaccttcagctccctataatgacatctctgacctgaccaatcaggactcctggttcatcggcttcccccccatctggaatgctggggagactgatttgagtaacaataaaactacggtct

SEQ ID NO: 24690 - DNA, 122 bp, Homo sapiens
  misc_feature (61)..(62): /note="This region represents a CpG dinucleotide"
  misc_feature (61)..(61): /note="Nucleotide may be methylated to form 5-methylcytosine"
taaaataacatttcaagtcagcatagtgtggtggttaagataagccaggggcttcggaatcgttgatccttggcttcatattctggttctgtcacttcctattaatagctgtgtgcccttgg

SEQ ID NO: 24691 - DNA, 122 bp, Homo sapiens
  misc_feature (61)..(62): /note="This region represents a CpG dinucleotide"
  misc_feature (61)..(61): /note="Nucleotide may be methylated to form 5-methylcytosine"
tgcccaaggtcatacttggagctggtattccagtttagttctttccacttcacaactctgcgtaaaagagtatcttgttataaatcccagtcacttctcagaacctctttccaagaaccgtt

SEQ ID NO: 24692 - DNA, 122 bp, Homo sapiens
  misc_feature (61)..(62): /note="This region represents a CpG dinucleotide"
  misc_feature (61)..(61): /note="Nucleotide may be methylated to form 5-methylcytosine"
tatctgaggcctcctgctaacagtcaacaccaactcatcaggcatgtgagtgagccaccacggaactggatcctccagccccactgaagcctttagatgactgcatgactgcaaccctggcc

SEQ ID NO: 24693 - DNA, 122 bp, Homo sapiens
  misc_feature (61)..(62): /note="This region represents a CpG dinucleotide"
  misc_feature (61)..(61): /note="Nucleotide may be methylated to form 5-methylcytosine"
gaaattctcatcatcaaataaaagaaacgtcagttcctcagagatcagttgatcttcacacgtaaagtttaaagtaaaaggaggaggaggagaagaaaatgaggaagaggaacaaaagaaat

SEQ ID NO: 24694 - DNA, 122 bp, Homo sapiens
  misc_feature (61)..(62): /note="This region represents a CpG dinucleotide"
  misc_feature (61)..(61): /note="Nucleotide may be methylated to form 5-methylcytosine"
acttctcctggacttgaatgtcaccatagaccttgaatccttgaatgtgaaatggcttcacgctaattgctgtaattgcttgaagatgtgcaggcaggtgaaacctgatccccgtggccatt

SEQ ID NO: 24695 - DNA, 122 bp, Homo sapiens
  misc_feature (61)..(62): /note="This region represents a CpG dinucleotide"
  misc_feature (61)..(61): /note="Nucleotide may be methylated to form 5-methylcytosine"
tccataatcatgtcatctgtcattccaaatgtcacatgcaggatgtttcgaaatgcattacgatccagtccaacaaccagaccttgcctctctactcctcccaccaagtcataaaaaagctt

SEQ ID NO: 24696 - DNA, 122 bp, Homo sapiens
  misc_feature (61)..(62): /note="This region represents a CpG dinucleotide"
  misc_feature (61)..(61): /note="Nucleotide may be methylated to form 5-methylcytosine"
gccgggtaggatggctccgtgtccagagagcggcttagtggagtggtaagaggcacattccgattgcctcgctccctggagctgcctccagcactaccattaacttggataaatcccataaa

SEQ ID NO: 24697 - DNA, 122 bp, Homo sapiens
  misc_feature (61)..(62): /note="This region represents a CpG dinucleotide"
  misc_feature (61)..(61): /note="Nucleotide may be methylated to form 5-methylcytosine"
aagtcaacacataaagagtgtaggctaaagtgtttcatgaggagagagggtgtcatgacacgtaactggaactgagtaaagtagcaaaagaaagagaagagaagccaaaggttttgttttta

SEQ ID NO: 24698 - DNA, 122 bp, Homo sapiens
  misc_feature (61)..(62): /note="This region represents a CpG dinucleotide"
  misc_feature (61)..(61): /note="Nucleotide may be methylated to form 5-methylcytosine"
cagattagtgacagagccagatctgaaatcatgcaatccagctcctgatgaataagcccacgcaggctgcactgagccttcatgcaggctgggtgtgtgcttggtaagtcagatcctggcct

SEQ ID NO: 24699 - DNA, 122 bp, Homo sapiens
  misc_feature (61)..(62): /note="This region represents a CpG dinucleotide"
  misc_feature (61)..(61): /note="Nucleotide may be methylated to form 5-methylcytosine"
gggaggccgggctgtctcgtcagcagcaggcgtgcccagggaaacgcaggtggcatacatcgcatgcataatctcaggagacggccactttaaatcttaattggttgccttttaaatatcat

SEQ ID NO: 24700 - DNA, 122 bp, Homo sapiens
  misc_feature (61)..(62): /note="This region represents a CpG dinucleotide"
  misc_feature (61)..(61): /note="Nucleotide may be methylated to form 5-methylcytosine"
ttccccttctgcaccctccgagcactgtggtcatctgtacatgcggcattcacgttagtgcgcatgcgcaaaaggtgcctaccgccctgcgctgcagtgtgtgcattctgtattgttgtccc

SEQ ID NO: 24701 - DNA, 122 bp, Homo sapiens
  misc_feature (61)..(62): /note="This region represents a CpG dinucleotide"
  misc_feature (61)..(61): /note="Nucleotide may be methylated to form 5-methylcytosine"
acttgtgtaccaggatgcagagttctccaggtagctggacgctggggactggttggaggtcggagggtgggcatgagggtggtggctgagcgagcgggacgagccctggggctcccacaccg

SEQ ID NO: 24702 - DNA, 122 bp, Homo sapiens
  misc_feature (61)..(62): /note="This region represents a CpG dinucleotide"
  misc_feature (61)..(61): /note="Nucleotide may be methylated to form 5-methylcytosine"
tgtcagcattaactgagcttacaggtaactgtccaacagagctgtgattgcaattagaggcggactgaggaattgtgacgcacagcccaaaagtgtctgccacaaaaggcaagattatgact

SEQ ID NO: 24703 - DNA, 122 bp, Homo sapiens
  misc_feature (61)..(62): /note="This region represents a CpG dinucleotide"
  misc_feature (61)..(61): /note="Nucleotide may be methylated to form 5-methylcytosine"
ctaaggagctaacatttggcttctgtctgaacttccaggggtcaagggtgagaagactttcgagcagaacattcccagcagcaaaagcaaatacaaaggcccagagatcaaaacaagattag

SEQ ID NO: 24704 - DNA, 122 bp, Homo sapiens
  misc_feature (61)..(62): /note="This region represents a CpG dinucleotide"
  misc_feature (61)..(61): /note="Nucleotide may be methylated to form 5-methylcytosine"
gttctcttgccctcagcatttgtaaaacatgatcaaccaggcaggcgagcggcctctgtccgagcagaatttattctgctgtgaaaagacacgtgtgggtcctgaggctcttgccggcttgt

SEQ ID NO: 24705 - DNA, 122 bp, Homo sapiens
  misc_feature (61)..(62): /note="This region represents a CpG dinucleotide"
  misc_feature (61)..(61): /note="Nucleotide may be methylated to form 5-methylcytosine"
ctgggtaattgtgaagttagacatgtgtttccttgtaaatgtctctctgcagagtcatctcgtttccaaagccctaaagaaaattaacagcagaaggctgccggttaaccatgtactctcat

SEQ ID NO: 24706 - DNA, 122 bp, Homo sapiens
  misc_feature (61)..(62): /note="This region represents a CpG dinucleotide"
  misc_feature (61)..(61): /note="Nucleotide may be methylated to form 5-methylcytosine"
ttcctcatgaaagctaggaaggcatgtgggcatgtagccaccacactgcgaaatgctcagcgtggtaggaagtctacatgaaagtggaaccacctgtgtagcagacacagcgctgttgcata

SEQ ID NO: 24707 - DNA, 122 bp, Homo sapiens
  misc_feature (61)..(62): /note="This region represents a CpG dinucleotide"
  misc_feature (61)..(61): /note="Nucleotide may be methylated to form 5-methylcytosine"
aaaacatgccaataagctctgtccttcctaggcaatttgtacataatgttttgcctggcccgaagcattcttcacatgattacctcttctctaactctcaagtttcagtttaaggttaactt

SEQ ID NO: 24708 - DNA, 122 bp, Homo sapiens
  misc_feature (61)..(62): /note="This region represents a CpG dinucleotide"
  misc_feature (61)..(61): /note="Nucleotide may be methylated to form 5-methylcytosine"
cctcactctcaggtctctttaccttggcttaccttgacattgggcatgtatttagagaagcgctcatattccttgctgatctgaaaagccaactcccgagtgtgacacatcaccagtacaga

SEQ ID NO: 24709 - DNA, 122 bp, Homo sapiens
  misc_feature (61)..(62): /note="This region represents a CpG dinucleotide"
  misc_feature (61)..(61): /note="Nucleotide may be methylated to form 5-methylcytosine"
gaatcagtaactccaatgagcccctattatgtgccaggccttgtacaattctcaggtaatcgtcactggccccagggtaaggcagggcagaatatcctccctatgtcaccagaccagggtca

SEQ ID NO: 24710 - DNA, 122 bp, Homo sapiens
  misc_feature (61)..(62): /note="This region represents a CpG dinucleotide"
  misc_feature (61)..(61): /note="Nucleotide may be methylated to form 5-methylcytosine"
ccttagctattactgtttttcaggtgtccttgactcaccattctcttattacagagactacgtctgtcttactcatttgtttccaaaacctcctcgagtaaaaagaggaatttgctggaagg

SEQ ID NO: 24711 - DNA, 122 bp, Homo sapiens
  misc_feature (61)..(62): /note="This region represents a CpG dinucleotide"
  misc_feature (61)..(61): /note="Nucleotide may be methylated to form 5-methylcytosine"
ggagtgtttggacgttgttcaggcattccctgctcgcctcacatagtcatgactgatagacggtgactgttgttcttgcacacctgtgtcaccaaagcagctgaatgagcagtgggaaatga

SEQ ID NO: 24712 - DNA, 122 bp, Homo sapiens
  misc_feature (61)..(62): /note="This region represents a CpG dinucleotide"
  misc_feature (61)..(61): /note="Nucleotide may be methylated to form 5-methylcytosine"
ccgtgccttcatgttccttaatgttgtgtttactattggtgatctctccctgatgttggacgagaactctaagcaggttccaagatgttttgcttactcttaggtaagggacaattccaggg

SEQ ID NO: 24713 - DNA, 122 bp, Homo sapiens
  misc_feature (61)..(62): /note="This region represents a CpG dinucleotide"
  misc_feature (61)..(61): /note="Nucleotide may be methylated to form 5-methylcytosine"
cacttgcccttcccttccatacctttgcctggtgaaccacacttgactcacctcttaccacgcctttctgggctggaccctagcacctgggatattcctttgccacaggcacaccctcctta

SEQ ID NO: 24714 - DNA, 122 bp, Homo sapiens
  misc_feature (61)..(62): /note="This region represents a CpG dinucleotide"
  misc_feature (61)..(61): /note="Nucleotide may be methylated to form 5-methylcytosine"
tgcaagcatggtagtagtgccttgaaaaaaaaaaccagtcgatttaagtagtagattgtgcggttcagtagcatggaacaaagttcattgtcatatcctggacagaacatttcttggatctt

SEQ ID NO: 24715 - DNA, 122 bp, Homo sapiens
  misc_feature (61)..(62): /note="This region represents a CpG dinucleotide"
  misc_feature (61)..(61): /note="Nucleotide may be methylated to form 5-methylcytosine"
cttcttagcatcgtgcttcctgagcaagcctggcattgcctcacagaccttcctcagagccgctttcagaaaagcaaggtaagcagggacggggacattcccagggtcttgggtcgcacact

SEQ ID NO: 24716 - DNA, 122 bp, Homo sapiens
  misc_feature (61)..(62): /note="This region represents a CpG dinucleotide"
  misc_feature (61)..(61): /note="Nucleotide may be methylated to form 5-methylcytosine"
agtccctctctcagattccaatcacctcctgctgatttccatctaagtttcttggtgaatcgttatctgtgggcccaggtacatcaaggccgtaagctgaaaaattcctctgagcagaacca

SEQ ID NO: 24717 - DNA, 122 bp, Homo sapiens
  misc_feature (61)..(62): /note="This region represents a CpG dinucleotide"
  misc_feature (61)..(61): /note="Nucleotide may be methylated to form 5-methylcytosine"
tctctgctttagtgacaaggtcccagcccacgctgccaggcactgctgtggcaccccctgcggcagtcccggatccgagcaacccccaatggctgtgtgtggaaggaggaagcgagaatgtg

SEQ ID NO: 24718 - DNA, 122 bp, Homo sapiens
  misc_feature (61)..(62): /note="This region represents a CpG dinucleotide"
  misc_feature (61)..(61): /note="Nucleotide may be methylated to form 5-methylcytosine"
tttctgtccctcacaactttcatcataagataaatctaatgttcaactagagatctctcccgcgccttgaacttgcaaatttatgaatcaggggcaaaaaaaacccggataccgagcctggc

SEQ ID NO: 24719 - DNA, 122 bp, Homo sapiens
  misc_feature (61)..(62): /note="This region represents a CpG dinucleotide"
  misc_feature (61)..(61): /note="Nucleotide may be methylated to form 5-methylcytosine"
cgcccacctacgcctcccagagtgttgggattactggattgagccacgcatctggctgaacgttattttttaaatcaccagagaaagtaaaggagtgctcaaaatagtgtcagatgatgagt

SEQ ID NO: 24720 - DNA, 122 bp, Homo sapiens
  misc_feature (61)..(62): /note="This region represents a CpG dinucleotide"
  misc_feature (61)..(61): /note="Nucleotide may be methylated to form 5-methylcytosine"
aaaaaaaaaaaaagcaagccatgtatgctctgtcttgcaaaagtcctcttccccttactacggtttccaagaagtacaggggacaggacactgtcacataacagggaaactggcaaaatcta

SEQ ID NO: 24721 - DNA, 122 bp, Homo sapiens
  misc_feature (61)..(62): /note="This region represents a CpG dinucleotide"
  misc_feature (61)..(61): /note="Nucleotide may be methylated to form 5-methylcytosine"
gataatactactggctaccaaccatccttttcttggggttgggctactgtccaatgagcacgtagtgagggcagtgctgctaacacctacacaaaattcctgcatcagctacagctttactt

SEQ ID NO: 24722 - DNA, 122 bp, Homo sapiens
  misc_feature (61)..(62): /note="This region represents a CpG dinucleotide"
  misc_feature (61)..(61): /note="Nucleotide may be methylated to form 5-methylcytosine"
cagaaaactcaacccgtacgctgggagctgcctcgggtaacgcagagctgtgcctgggtgcggggtcctataacatgcccgttctagtactgccatgaggaaggccccagcaccaaggggcc

SEQ ID NO: 24723 - DNA, 122 bp, Homo sapiens
  misc_feature (61)..(62): /note="This region represents a CpG dinucleotide"
  misc_feature (61)..(61): /note="Nucleotide may be methylated to form 5-methylcytosine"
cactagacttgttccttgtttccattttaatttcgtacatatttagatttaccaggaattcggagagggtttatgtttagctaatgcatcattatgtttgcggggcttgcacacacgtagaa

SEQ ID NO: 24724 - DNA, 122 bp, Homo sapiens
  misc_feature (61)..(62): /note="This region represents a CpG dinucleotide"
  misc_feature (61)..(61): /note="Nucleotide may be methylated to form 5-methylcytosine"
ccggcaatgcaagtgagtcctgtttgacctcgtcaatcatcgcagactgtaaaggtgactcggatgctcaagaaacgagcatacccagcagtgggccccagacttctcgcaggcccaggtcc

SEQ ID NO: 24725 - DNA, 122 bp, Homo sapiens
  misc_feature (61)..(62): /note="This region represents a CpG dinucleotide"
  misc_feature (61)..(61): /note="Nucleotide may be methylated to form 5-methylcytosine"
caagatcctggaggtttttttcaaagaattgtaacagaagatgaaacatggctttaccaacgatcctgaaggcaaaccacattcaaagcaatggctactgagaagtggaagtggtcagtcaa

SEQ ID NO: 24726 - DNA, 122 bp, Homo sapiens
  misc_feature (61)..(62): /note="This region represents a CpG dinucleotide"
  misc_feature (61)..(61): /note="Nucleotide may be methylated to form 5-methylcytosine"
caactctcaaccttaattccgtctcatgacatggtgaccgctcatgatctcatgatctcacgtctctggacttcacccttcccctgcctgcaatgtccttcttagtccctcctcggctggtc

SEQ ID NO: 24727 - DNA, 122 bp, Homo sapiens
  misc_feature (61)..(62): /note="This region represents a CpG dinucleotide"
  misc_feature (61)..(61): /note="Nucleotide may be methylated to form 5-methylcytosine"
gatgctgtctctgtaattggcagagagggacatcttgataatggaagtgtgaaggtgtaacgtgtgttaattgatacttcttaatcacttttaggtattaagtcatgatgcaggaatctgcg

SEQ ID NO: 24728 - DNA, 122 bp, Homo sapiens
  misc_feature (61)..(62): /note="This region represents a CpG dinucleotide"
  misc_feature (61)..(61): /note="Nucleotide may be methylated to form 5-methylcytosine"
gtccgggacgaggcgaggcccgtgcagacccgatggcaccgcacactcacgccccacacacggatgggacctgggctcagcccagctaccagcagctcacatgtggggtgtggggacctcgc

SEQ ID NO: 24729 - DNA, 122 bp, Homo sapiens
  misc_feature (61)..(62): /note="This region represents a CpG dinucleotide"
  misc_feature (61)..(61): /note="Nucleotide may be methylated to form 5-methylcytosine"
caaccaggtgccattttctctttagatcctttaatcccccgagggacatcagccgtgaaacgactcacaccactgcagcagcaggggtaaggcagtgatcgttctagaacaggctgaaggct

SEQ ID NO: 24730 - DNA, 122 bp, Homo sapiens
  misc_feature (61)..(62): /note="This region represents a CpG dinucleotide"
  misc_feature (61)..(61): /note="Nucleotide may be methylated to form 5-methylcytosine"
aagaagatagtggttgcttagagcgggaggtggggatgatttgggaaatgactcctgatacgtaaagggtttctttctggcatgatgggaatgttctaaaattagattgtggtgatggttgc

SEQ ID NO: 24731 - DNA, 122 bp, Homo sapiens
  misc_feature (61)..(62): /note="This region represents a CpG dinucleotide"
  misc_feature (61)..(61): /note="Nucleotide may be methylated to form 5-methylcytosine"
acggctgctctatgaacacagcatcactaccagtgaggtggtgcagcttaacacacgccacgtactcatggaaagctgtgtgagaaacccactggtaggttaattgatattttaagtccaat

SEQ ID NO: 24732 - DNA, 122 bp, Homo sapiens
  misc_feature (61)..(62): /note="This region represents a CpG dinucleotide"
  misc_feature (61)..(61): /note="Nucleotide may be methylated to form 5-methylcytosine"
atgcactttccgtgtgatccccaatacctttgccgtcttctgtagcaagtcagccacaaccgcaggcccgttatctgagccaatccggaagggctgtcccaatctacgaatcagatctcgaa

SEQ ID NO: 24733 - DNA, 122 bp, Homo sapiens
  misc_feature (61)..(62): /note="This region represents a CpG dinucleotide"
  misc_feature (61)..(61): /note="Nucleotide may be methylated to form 5-methylcytosine"
agaaacaggaccagaactcagagaacagagccaaaggctgctggttgaccaggaagttaccgtaaggtttatcaagttgtatgggaatgtatgaagagtcaggagactgagaaatagccaga

SEQ ID NO: 24734 - DNA, 122 bp, Homo sapiens
  misc_feature (61)..(62): /note="This region represents a CpG dinucleotide"
  misc_feature (61)..(61): /note="Nucleotide may be methylated to form 5-methylcytosine"
gttaaaatcaagggtccccactagggcagacgccaagaggacggtatcagcacaacagctcggcccccaggaacagaagtctctctgccaccttctacctcgaattcctgagaattcttcgt

SEQ ID NO: 24735 - DNA, 122 bp, Homo sapiens
  misc_feature (61)..(62): /note="This region represents a CpG dinucleotide"
  misc_feature (61)..(61): /note="Nucleotide may be methylated to form 5-methylcytosine"
tggactgcgtctccagccacggcagcagctggtggatggggtgatgccttggatatttatcgtgtgtttcttgcctggcctgcccttggacagtgcgcctcaggaatgttagaatgtgttcc

SEQ ID NO: 24736 - DNA, 122 bp, Homo sapiens
  misc_feature (61)..(62): /note="This region represents a CpG dinucleotide"
  misc_feature (61)..(61): /note="Nucleotide may be methylated to form 5-methylcytosine"
gtcatttggcaatttggtccttgtgtgagcatcatagggcaaacttacacaaacctacatcgtaaggtgtactatgcacctaggcaatatggtacagcctgttgctcttaggctacaaacct

SEQ ID NO: 24737 - DNA, 122 bp, Homo sapiens
  misc_feature (61)..(62): /note="This region represents a CpG dinucleotide"
  misc_feature (61)..(61): /note="Nucleotide may be methylated to form 5-methylcytosine"
accagtgaagccacagaaaccttccgccccagaactggagtttcttaatcactatccagacgttaaaataaggaagtcactggttgaagatggcaggcaatccctggtctataataattttc

SEQ ID NO: 24738 - DNA, 122 bp, Homo sapiens
  misc_feature (61)..(62): /note="This region represents a CpG dinucleotide"
  misc_feature (61)..(61): /note="Nucleotide may be methylated to form 5-methylcytosine"
ttccctcccagtgacctttgaagtaaggcgaattgaagtccgctggtctccagacaggcacggtaacgtgcacgcatcggatgtggttcccggggaatggtgggtgattgtccatcttccta

SEQ ID NO: 24739 - DNA, 122 bp, Homo sapiens
  misc_feature (61)..(62): /note="This region represents a CpG dinucleotide"
  misc_feature (61)..(61): /note="Nucleotide may be methylated to form 5-methylcytosine"
aggctgcctgcttccagcccctccattcattctgtctgtccacctgcagaccttttgtcacgccccatgctccatcgccactgctcttagtcaggcatgggatctgggagctgagaccctcc

SEQ ID NO: 24740 - DNA, 122 bp, Homo sapiens
  misc_feature (61)..(62): /note="This region represents a CpG dinucleotide"
  misc_feature (61)..(61): /note="Nucleotide may be methylated to form 5-methylcytosine"
caccactgcctttttttttttttttttttttttttccaatgcagttgcgtggtgtgaaggcgataactgcagacactcaggtgtaaacaacccagggaatcaatgggttggggggatggtaa

SEQ ID NO: 24741 - DNA, 122 bp, Homo sapiens
  misc_feature (61)..(62): /note="This region represents a CpG dinucleotide"
  misc_feature (61)..(61): /note="Nucleotide may be methylated to form 5-methylcytosine"
agtgaacagtgtttgctgctctgtacactcggacgaactgtggttgctactctgtacactcggacgaactgtggttgctgtcttcaaggagatgtgatccagtgggagagaaatatacctac

SEQ ID NO: 24742 - DNA, 122 bp, Homo sapiens
  misc_feature (61)..(62): /note="This region represents a CpG dinucleotide"
  misc_feature (61)..(61): /note="Nucleotide may be methylated to form 5-methylcytosine"
ctatagatgtgcataaattgagagcaaaaccccaaatgttttagaaactttaatggctaccgtatttcaagcaatcagtaaagtaaactttaaaaaatactggtgcagtttattgcttcata

SEQ ID NO: 24743 - DNA, 122 bp, Homo sapiens
  misc_feature (61)..(62): /note="This region represents a CpG dinucleotide"
  misc_feature (61)..(61): /note="Nucleotide may be methylated to form 5-methylcytosine"
tgcacctgtattcattgtggaacttcctctttcattggaaactttcttactcaagaatgacggcagtattgttttcttatatgtgcaatgaagtggaatgataaacagtatgcctttaattt

SEQ ID NO: 24744 - DNA, 122 bp, Homo sapiens
  misc_feature (61)..(62): /note="This region represents a CpG dinucleotide"
  misc_feature (61)..(61): /note="Nucleotide may be methylated to form 5-methylcytosine"
atttccttccccttcaaatatcagccttatgctggtactggggatacccagggagtgagacgtggtctccagcttatagatgctcgaagtaaaagaggagatggaacaattgtcacagttac

SEQ ID NO: 24745 - DNA, 122 bp, Homo sapiens
  misc_feature (61)..(62): /note="This region represents a CpG dinucleotide"
  misc_feature (61)..(61): /note="Nucleotide may be methylated to form 5-methylcytosine"
tcctgtgggactgagcgcttaacctgtgtggcaactgtgctaacttcaggcaattagtaacgaaattgaattgcattgtaggacattcagctggtgtcagggaattgctattggaatgatgt

SEQ ID NO: 24746 - DNA, 122 bp, Homo sapiens
  misc_feature (61)..(62): /note="This region represents a CpG dinucleotide"
  misc_feature (61)..(61): /note="Nucleotide may be methylated to form 5-methylcytosine"
cttggacttcctttcagcatccaccctgcctggctactgctttcttgttttgtgtttttgcgtttaaattcccagtcttagttttctgccctgtcaagtcctggtggtcggacgacagaagt

SEQ ID NO: 24747 - DNA, 122 bp, Homo sapiens
  misc_feature (61)..(62): /note="This region represents a CpG dinucleotide"
  misc_feature (61)..(61): /note="Nucleotide may be methylated to form 5-methylcytosine"
gggtgcagagggtggatttgcttgcttgtcctagctcacacagctagtgggtggtggatccgtgctcttgaccaccccactctgttgcctttctgttagacaacaccttgtctactttctct

SEQ ID NO: 24748 - DNA, 122 bp, Homo sapiens
  misc_feature (61)..(62): /note="This region represents a CpG dinucleotide"
  misc_feature (61)..(61): /note="Nucleotide may be methylated to form 5-methylcytosine"
aaaatatatttaatgactcacaggactacatttgagattcacagtggggagagagaagcacggacactataccaggaactgaacaagccaagaagaaattagtgaaaggttttttgttttgc

SEQ ID NO: 24749 - DNA, 122 bp, Homo sapiens
  misc_feature (61)..(62): /note="This region represents a CpG dinucleotide"
  misc_feature (61)..(61): /note="Nucleotide may be methylated to form 5-methylcytosine"
ccgagaccttgagcatctgcgaggccatgaagttgacctgcgtgttgtacgtggcctgcacgctgcgccggatacgcagcatttccttgatggtgtcctcattgccatgccggacctcaaag

SEQ ID NO: 24750 - DNA, 122 bp, Homo sapiens
  misc_feature (61)..(62): /note="This region represents a CpG dinucleotide"
  misc_feature (61)..(61): /note="Nucleotide may be methylated to form 5-methylcytosine"
atattctagtcaaggatacagatagcaaacaagataaataagtaaagcattagtatgttacgatacttgcccaggtgaaccagaaaaatctgagactgagtataggaatttggggaagcttg

SEQ ID NO: 24751 - DNA, 122 bp, Homo sapiens
  misc_feature (61)..(62): /note="This region represents a CpG dinucleotide"
  misc_feature (61)..(61): /note="Nucleotide may be methylated to form 5-methylcytosine"
gctggtgtgagtaagtggaaagccattttagagaagccagaattgggttgccatctgtcacgcatgggctttgctccttacacatattggtgaataaaatgtttaacaggctgtagccggaa

SEQ ID NO: 24752 - DNA, 122 bp, Homo sapiens
  misc_feature (61)..(62): /note="This region represents a CpG dinucleotide"
  misc_feature (61)..(61): /note="Nucleotide may be methylated to form 5-methylcytosine"
gtttattgaatgcctgctgagtgtcaatctctgaattgtacagtgagagggcagggtctgcggagatctgaaagatgaagaagagaattgagcctcctatccatgggactcagatgacaact

SEQ ID NO: 24753 - DNA, 122 bp, Homo sapiens
  misc_feature (61)..(62): /note="This region represents a CpG dinucleotide"
  misc_feature (61)..(61): /note="Nucleotide may be methylated to form 5-methylcytosine"
tccttgatagcagccctctagggccctggagtgagggacagctcttctcattcaggctctcggcactgctgagggcaggtgacagcctaaccagctgtcacacatcaggacagccctagaag

SEQ ID NO: 24754 - DNA, 122 bp, Homo sapiens
  misc_feature (61)..(62): /note="This region represents a CpG dinucleotide"
  misc_feature (61)..(61): /note="Nucleotide may be methylated to form 5-methylcytosine"
acagcagagggagccagtggaagaaacagaaaaacagcatgggtgtgaagtgcagtgctacgcagcttgtggtccttcagtaattcttgagcatgtcatgggattatgtgacaaatttagtg

SEQ ID NO: 24755 - DNA, 122 bp, Homo sapiens
  misc_feature (61)..(62): /note="This region represents a CpG dinucleotide"
  misc_feature (61)..(61): /note="Nucleotide may be methylated to form 5-methylcytosine"
atttatttttcttttttttttcctctttctttttttaaactccatcctggtagtaggtggcgctgtaggtttttgtgtgccttactgaacattacctagatctagggcttaagcggcagatt

SEQ ID NO: 24756 - DNA, 122 bp, Homo sapiens
  misc_feature (61)..(62): /note="This region represents a CpG dinucleotide"
  misc_feature (61)..(61): /note="Nucleotide may be methylated to form 5-methylcytosine"
tgcagagaggaaacctagattttgtggtcaccagccttgaaagctattggccatgaaagccgcttgtagggcatctgtcttatttatttatttattgagacagagtctccctctgttgccca

SEQ ID NO: 24757 - DNA, 122 bp, Homo sapiens
  misc_feature (61)..(62): /note="This region represents a CpG dinucleotide"
  misc_feature (61)..(61): /note="Nucleotide may be methylated to form 5-methylcytosine"
agaagctgtttcagacccacaatgggagcaggctgcatcttttgcctactcaggataaaacgtgacactgctgcgtcatacagagatagttctgcatggtttcctaagaaaggcaaagccag

SEQ ID NO: 24758 - DNA, 122 bp, Homo sapiens
  misc_feature (61)..(62): /note="This region represents a CpG dinucleotide"
  misc_feature (61)..(61): /note="Nucleotide may be methylated to form 5-methylcytosine"
gaccttacaaataaagtcagatcttatgaggcatcatgaaatacagagtaaacaggaacacgatgtcctttggtgaggcttgataaccatagcagcaaagaaggacacaataagctgcaata

SEQ ID NO: 24759 - DNA, 122 bp, Homo sapiens
  misc_feature (61)..(62): /note="This region represents a CpG dinucleotide"
  misc_feature (61)..(61): /note="Nucleotide may be methylated to form 5-methylcytosine"
aataaaaaataatgtccctagctcacgagagtctttgcaagctttacagagtggtcagctcgtccatggaacataaatatctattcaaagggaatggaagaaagcattatgcatagactttt

SEQ ID NO: 24760 - DNA, 122 bp, Homo sapiens
  misc_feature (61)..(62): /note="This region represents a CpG dinucleotide"
  misc_feature (61)..(61): /note="Nucleotide may be methylated to form 5-methylcytosine"
gatctcactccagtgtcccccttggtagaacccaaatggaagccagaggacaaaggagctcgctgatgtagaacatacagattagctactataggggttcccagcccccaggtcacagactg

SEQ ID NO: 24761 - DNA, 122 bp, Homo sapiens
  misc_feature (61)..(62): /note="This region represents a CpG dinucleotide"
  misc_feature (61)..(61): /note="Nucleotide may be methylated to form 5-methylcytosine"
cttaagtgatccgcctgcctaagcttcccaaagtgctaggattataggcgtgagccaccgcgcccagctagtgctgttcttaaggttagttgtgactcagagtcctcttggggaaagccaga

SEQ ID NO: 24762 - DNA, 122 bp, Homo sapiens
  misc_feature (61)..(62): /note="This region represents a CpG dinucleotide"
  misc_feature (61)..(61): /note="Nucleotide may be methylated to form 5-methylcytosine"
cgaatccaaaaaccatcaccacagcaccaatgggaagcatgacacaagacataatcttatcggagtgtgtccttggttcttcagacagtttcagataacaggctgatggaatgataaaaatg

SEQ ID NO: 24763 - DNA, 122 bp, Homo sapiens
  misc_feature (61)..(62): /note="This region represents a CpG dinucleotide"
  misc_feature (61)..(61): /note="Nucleotide may be methylated to form 5-methylcytosine"
ctctaaatatcaagtaatcacatttgatgtttgcaccactgtattgctttgtagggctgccgtaacagagtaccacaaattgtgtagttttttataataacagaaatctattctgtcacatt

SEQ ID NO: 24764 - DNA, 122 bp, Homo sapiens
  misc_feature (61)..(62): /note="This region represents a CpG dinucleotide"
  misc_feature (61)..(61): /note="Nucleotide may be methylated to form 5-methylcytosine"
ttgatagatggctgtcatttcactgtcacctcaagtggcagaaggaggaaggaaaccctccgtgttctcttgtataagggcaattattcccatggcagagctctcatgacctaatcacctcc

SEQ ID NO: 24765 - DNA, 122 bp, Homo sapiens
  misc_feature (61)..(62): /note="This region represents a CpG dinucleotide"
  misc_feature (61)..(61): /note="Nucleotide may be methylated to form 5-methylcytosine"
aatacctgaaatacatgcaaaccactcagagaagtcaaacttttttttttctgtcttccccgccaaggtctcatatttactttatcccaagagcaatttggtctcggaaaattggaccccca

SEQ ID NO: 24766 - DNA, 122 bp, Homo sapiens
  misc_feature (61)..(62): /note="This region represents a CpG dinucleotide"
  misc_feature (61)..(61): /note="Nucleotide may be methylated to form 5-methylcytosine"
tatgaaacctaaagggcaaatttaaaaaaacaccgatcaactaaagttatataacttattcgcatattgaggtctgagtgctaggcattgtttagactagagagacagttatcaacatacca

SEQ ID NO: 24767 - DNA, 122 bp, Homo sapiens
  misc_feature (61)..(62): /note="This region represents a CpG dinucleotide"
  misc_feature (61)..(61): /note="Nucleotide may be methylated to form 5-methylcytosine"
ctctaccaacatgcgcatacggaagcttctcaacataagtcctgacctggtcaccaggcacggaaggagacttcccagtggtattttatagaagaggaagttgagtcaaagtgagaatgaaa

SEQ ID NO: 24768 - DNA, 122 bp, Homo sapiens
  misc_feature (61)..(62): /note="This region represents a CpG dinucleotide"
  misc_feature (61)..(61): /note="Nucleotide may be methylated to form 5-methylcytosine"
aagaaaagaggtttagttggctcagggttccacaggctttacaggaagcatggctggggacgcctcaggaaactttcaatcgtagtagaaggcaaaggggaaacaagcacatcatcatatgg

SEQ ID NO: 24769 - DNA, 122 bp, Homo sapiens
  misc_feature (61)..(62): /note="This region represents a CpG dinucleotide"
  misc_feature (61)..(61): /note="Nucleotide may be methylated to form 5-methylcytosine"
aagagaacctgcagtcttacagagaaatgcacaagtctggctggattcaccacttgctgacggaagaacctttgggccttgaataaacatgagtgttggccaaacaatagtcaccacatacc

SEQ ID NO: 24770 - DNA, 122 bp, Homo sapiens
  misc_feature (61)..(62): /note="This region represents a CpG dinucleotide"
  misc_feature (61)..(61): /note="Nucleotide may be methylated to form 5-methylcytosine"
ttagatttctcacctgaacttgaagcacaggctagactactgagctcctaacttgtgggtcgcacaggcacctcaaacctcacacatcccacactgaacacacactgtcttccctccaaagg

SEQ ID NO: 24771 - DNA, 122 bp, Homo sapiens
  misc_feature (61)..(62): /note="This region represents a CpG dinucleotide"
  misc_feature (61)..(61): /note="Nucleotide may be methylated to form 5-methylcytosine"
cctgtctcccctccccagttctcacagcccgaggaagatgctgcggcgattcccactttacggctaatgccaggcccaggtatgccatactgctgtcagggctctcaccaccccaccttggg

SEQ ID NO: 24772 - DNA, 122 bp, Homo sapiens
  misc_feature (61)..(62): /note="This region represents a CpG dinucleotide"
  misc_feature (61)..(61): /note="Nucleotide may be methylated to form 5-methylcytosine"
tttgatggtcttcccttcaagaggtggagcttaattcttcttagtatgggctggacctggcgacatgcttctaaggattgtaattcttcagcagaagtgatggtttgtgacactgaaaactt

SEQ ID NO: 24773 - DNA, 122 bp, Homo sapiens
  misc_feature (61)..(62): /note="This region represents a CpG dinucleotide"
  misc_feature (61)..(61): /note="Nucleotide may be methylated to form 5-methylcytosine"
gtgataacacctacctcagcctcccaaagtgctgggattacaggtatgagccaccatgcccggacaagattatcctggcccttggtgtaaagagtgatctttgacttgcaacctggacattc

SEQ ID NO: 24774 - DNA, 122 bp, Homo sapiens
  misc_feature (61)..(62): /note="This region represents a CpG dinucleotide"
  misc_feature (61)..(61): /note="Nucleotide may be methylated to form 5-methylcytosine"
ttgccacagctaatgagtggcagcactagcatttgagtccaggtctatctgattcccagtcgcagccacttagccccagactgtgccgctttccgcatagctgtcctgccatggatattatc

SEQ ID NO: 24775 - DNA, 122 bp, Homo sapiens
  misc_feature (61)..(62): /note="This region represents a CpG dinucleotide"
  misc_feature (61)..(61): /note="Nucleotide may be methylated to form 5-methylcytosine"
gaaaaaaaagtgctagctgggcactactgttctgattagagagaggaggaaactaaggcacggagaggttaagtaatttgccccaggtttcgtagctaacaagtgaaggagccagaatttca

SEQ ID NO: 24776 - DNA, 122 bp, Homo sapiens
  misc_feature (61)..(62): /note="This region represents a CpG dinucleotide"
  misc_feature (61)..(61): /note="Nucleotide may be methylated to form 5-methylcytosine"
cagcctggcactggctggatgctgggctgcctatcctgggggccgtggcccagtgtgaggcgtttgcaaccgtgcgtgtgcagcacatgtgcgtgcccacacatgtggggtgtggtctgcat

SEQ ID NO: 24777 - DNA, 122 bp, Homo sapiens
  misc_feature (61)..(62): /note="This region represents a CpG dinucleotide"
  misc_feature (61)..(61): /note="Nucleotide may be methylated to form 5-methylcytosine"
tgagacagagagaaaaacaaagggctgaattcttcatagttctggacctcagctcctttgcgtgacagctgctatacttacagctgtgcattgcatgtggtgcctttcagaattcatcagat

SEQ ID NO: 24778 - DNA, 122 bp, Homo sapiens
  misc_feature (61)..(62): /note="This region represents a CpG dinucleotide"
  misc_feature (61)..(61): /note="Nucleotide may be methylated to form 5-methylcytosine"
ttctaggaggatgacctagcaagcaacaggctcccattggctggcatgggttttatctcacggaattatgtgagattgcaccactaaaatgctgctgccaggtggagtttaggatgactatt

SEQ ID NO: 24779 - DNA, 122 bp, Homo sapiens
  misc_feature (61)..(62): /note="This region represents a CpG dinucleotide"
  misc_feature (61)..(61): /note="Nucleotide may be methylated to form 5-methylcytosine"
gccctgggctcccttcagctgcctgggccctaccctggagactgactcagtgaattgagccgcagtcttggtatctggaaggctaacaggtcttcccagctgattgtgctgcaggtgttgga

SEQ ID NO: 24780 - DNA, 122 bp, Homo sapiens
  misc_feature (61)..(62): /note="This region represents a CpG dinucleotide"
  misc_feature (61)..(61): /note="Nucleotide may be methylated to form 5-methylcytosine"
gattatagcaaactttaatgcactctcatcggctgactacaggcaagtaatcagtaacaacgcaactcactgcttctaacagttttccatagattaatataggatgtctctacctcacaggg

SEQ ID NO: 24781 - DNA, 122 bp, Homo sapiens
  misc_feature (61)..(62): /note="This region represents a CpG dinucleotide"
  misc_feature (61)..(61): /note="Nucleotide may be methylated to form 5-methylcytosine"
aatcttggtttccaaatccttgtgtctcctataataggaagccaggactgcaggacaacacgtggtcaaggagacctgaaaatcaggtctgagagcatttagcctggccttgggagatttcc

SEQ ID NO: 24782 - DNA, 122 bp, Homo sapiens
  misc_feature (61)..(62): /note="This region represents a CpG dinucleotide"
  misc_feature (61)..(61): /note="Nucleotide may be methylated to form 5-methylcytosine"
aatcagtatagaaagtggacgtggcttggcttgttagatcgtttctgtatccgggaaaggcgatgtgggcagagctggagctgcccccccagaggggccagttgttggagacagcagtgatg

SEQ ID NO: 24783 - DNA, 122 bp, Homo sapiens
  misc_feature (61)..(62): /note="This region represents a CpG dinucleotide"
  misc_feature (61)..(61): /note="Nucleotide may be methylated to form 5-methylcytosine"
taacagagttcctcaaaaacaggcaggtacaggcatgttcccaaaagcagtggcggagcacgccatgagaccacacaggcccttactcgtcaggaggaggactctgatttttactgtaacct

SEQ ID NO: 24784 - DNA, 122 bp, Homo sapiens
  misc_feature (61)..(62): /note="This region represents a CpG dinucleotide"
  misc_feature (61)..(61): /note="Nucleotide may be methylated to form 5-methylcytosine"
tctgtgtctctgtgcatgcctgtgtctctgtgtgtgcccgtgtgcctgtgtgtctgttagcgtgtctctgtgtgcgtgcctgtgcgtgcctgtgtctgcatgtctgtgcctgtgtgcatgcc

SEQ ID NO: 24785 - DNA, 122 bp, Homo sapiens
  misc_feature (61)..(62): /note="This region represents a CpG dinucleotide"
  misc_feature (61)..(61): /note="Nucleotide may be methylated to form 5-methylcytosine"
attcaaaatgaatgtactttctcctcctcctcacattctgtgaggccattaggcaccaggcgagcagtgcaggctctggaaacaacagaagtgtccctaaaccagtggacaattgaagacac

SEQ ID NO: 24786 - DNA, 122 bp, Homo sapiens
  misc_feature (61)..(62): /note="This region represents a CpG dinucleotide"
  misc_feature (61)..(61): /note="Nucleotide may be methylated to form 5-methylcytosine"
tacctgggtggtgattgtgggcctgactcgcagcttgaggcagggctcctttggaatcaacgtgcctagcttttgagcttgccagtgacacacagaggccatcttatcagctctggacaggg

SEQ ID NO: 24787 - DNA, 122 bp, Homo sapiens
  misc_feature (61)..(62): /note="This region represents a CpG dinucleotide"
  misc_feature (61)..(61): /note="Nucleotide may be methylated to form 5-methylcytosine"
ttggtctggccagtcagggcaagagtgcagggtcacaaggtccaaagcatggcaactaagcgtcaaaaacccttcagggtgagatttggaaatggacagatatctgtcaaaagagagttatg

SEQ ID NO: 24788 - DNA, 122 bp, Homo sapiens
  misc_feature (61)..(62): /note="This region represents a CpG dinucleotide"
  misc_feature (61)..(61): /note="Nucleotide may be methylated to form 5-methylcytosine"
tcccggtagattcaggctgggccaacctgagagtctgtctcagtaacaaagggaaccctgcgcccagctgaagtgcaggcaatgtttacccgaaagctgggggtgggtccgcatttccagga

SEQ ID NO: 24789 - DNA, 122 bp, Homo sapiens
  misc_feature (61)..(62): /note="This region represents a CpG dinucleotide"
  misc_feature (61)..(61): /note="Nucleotide may be methylated to form 5-methylcytosine"
tctgcttccgctatcatattatgagccaattatctgttcttctcttggggttacaatcaccgcctctctgttcttggtacctagcccagtggtgctcattaaatgtttattaatgaatgtga

SEQ ID NO: 24790 - DNA, 122 bp, Homo sapiens
  misc_feature (61)..(62): /note="This region represents a CpG dinucleotide"
  misc_feature (61)..(61): /note="Nucleotide may be methylated to form 5-methylcytosine"
gatcaatgtgagacaaaaatttctgccctgtggaacttagattctagtatagataaacaacgagacacatgaaaaaacatgtagtatgctggatagtgataaggaggaaaaaataaagacca

SEQ ID NO: 24791 - DNA, 122 bp, Homo sapiens
  misc_feature (61)..(62): /note="This region represents a CpG dinucleotide"
  misc_feature (61)..(61): /note="Nucleotide may be methylated to form 5-methylcytosine"
ttctatacaaattagtgtttcacctttcaaaacatctttaaacccagtaataatctcaatcgtgtatgctctatgtatttcctctgtcaaagaatacttcctcttatttctacaactcaaca

SEQ ID NO: 24792 - DNA, 122 bp, Homo sapiens
  misc_feature (61)..(62): /note="This region represents a CpG dinucleotide"
  misc_feature (61)..(61): /note="Nucleotide may be methylated to form 5-methylcytosine"
tgacatgaattggggccccagaagaaggcagaagccaggtacccagggtcttttaaaccacggcagtgagtttgaatgttatttcaagtgtgctggtgcactgttggcacgggggagagatg

SEQ ID NO: 24793 - DNA, 122 bp, Homo sapiens
  misc_feature (61)..(62): /note="This region represents a CpG dinucleotide"
  misc_feature (61)..(61): /note="Nucleotide may be methylated to form 5-methylcytosine"
atgcagcagacacggccagaggatgacgctgcacacgtgagcagggtcaggaggtacacacgtaccacaagcatgaagcacctcctacgtgcctgactgggcgaggtcccagctgccctcag

SEQ ID NO: 24794 - DNA, 122 bp, Homo sapiens
  misc_feature (61)..(62): /note="This region represents a CpG dinucleotide"
  misc_feature (61)..(61): /note="Nucleotide may be methylated to form 5-methylcytosine"
ggaggccgtggcaggcagatcacttgaaaagccatccatgatccatccatgatccagcctcgccatccatgatccagcctcgcctctcttttcctcacatatcctgtctactttactcccca

SEQ ID NO: 24795 - DNA, 122 bp, Homo sapiens
  misc_feature (61)..(62): /note="This region represents a CpG dinucleotide"
  misc_feature (61)..(61): /note="Nucleotide may be methylated to form 5-methylcytosine"
cactacctgccagttagtcgcttagtagccatctcagttaccagactgactatggcaggacgacagtgcttgtgtgcagcaacacttagcccttaattaataagtgagtttacttattagtg

SEQ ID NO: 24796 - DNA, 122 bp, Homo sapiens
  misc_feature (61)..(62): /note="This region represents a CpG dinucleotide"
  misc_feature (61)..(61): /note="Nucleotide may be methylated to form 5-methylcytosine"
tgtttccattggttttgcacaaaagctctacgaggtaggtgcaaccgttcttattgtacacggaaaggaaatgtggcttagggagatcaagtattcaccctatgtcacaaagctagtgagtg

SEQ ID NO: 24797 - DNA, 122 bp, Homo sapiens
  misc_feature (61)..(62): /note="This region represents a CpG dinucleotide"
  misc_feature (61)..(61): /note="Nucleotide may be methylated to form 5-methylcytosine"
cttaacgttagttaggttttatcccatgtgacaactactttccctcttccccagggggagcgaaagcacaagcctgcagaagcagctgccccgagaggcagagatgcccagagagagactgg

SEQ ID NO: 24798 - DNA, 122 bp, Homo sapiens
  misc_feature (61)..(62): /note="This region represents a CpG dinucleotide"
  misc_feature (61)..(61): /note="Nucleotide may be methylated to form 5-methylcytosine"
cttaataagccactgacccctcagccccacagagagctgggggtgcagcagtgcagcccacgcagttagcaccaaccgggcaggtccagggccaaagccaaatcctgctcagtggccagcgg

SEQ ID NO: 24799 - DNA, 122 bp, Homo sapiens
  misc_feature (61)..(62): /note="This region represents a CpG dinucleotide"
  misc_feature (61)..(61): /note="Nucleotide may be methylated to form 5-methylcytosine"
actgacctggtggctccacctggagccactgcccgagcctgcgaggtcaccaacagcctccgcaagatttccacacgtgtggctctccactgctcagggggcaggatgtgaagggccaagac

SEQ ID NO: 24800 - DNA, 122 bp, Homo sapiens
  misc_feature (61)..(62): /note="This region represents a CpG dinucleotide"
  misc_feature (61)..(61): /note="Nucleotide may be methylated to form 5-methylcytosine"
ccgtctctttcatcaatgacgaggtcgatgggcattttccccttcaaacagctaatgtatcggtggcagaagttatcgcacagttcgtggacctagaacgaaggtcatggtggagggtttag

SEQ ID NO: 24801 - DNA, 122 bp, Homo sapiens
  misc_feature (61)..(62): /note="This region represents a CpG dinucleotide"
  misc_feature (61)..(61): /note="Nucleotide may be methylated to form 5-methylcytosine"
ctttctccttcccaggattcggtcattgtctgcagcagctgtgcctgtgggacctgagcccgctgttacgaaggaaagcatggggatgactcagggagggtacatcagagcagtgtgggtgg

SEQ ID NO: 24802 - DNA, 122 bp, Homo sapiens
  misc_feature (61)..(62): /note="This region represents a CpG dinucleotide"
  misc_feature (61)..(61): /note="Nucleotide may be methylated to form 5-methylcytosine"
acatcagtttacaaaataaaagttcttacgtaagaaatgttagtcaccagtgtgatgaaacgtagaatgaaaccttaaactgtgttaatagaaatgtggtgtcagaatcatagatggtagtg

SEQ ID NO: 24803 - DNA, 122 bp, Homo sapiens
  misc_feature (61)..(62): /note="This region represents a CpG dinucleotide"
  misc_feature (61)..(61): /note="Nucleotide may be methylated to form 5-methylcytosine"
ttctggctctgtgacccggggagtctacctgtctgagcctcgactttctcattggtgaaacggtgatgataacagctcatatctcagaactgggtgtgaggatcaaattaggaaaatccgtt

SEQ ID NO: 24804 - DNA, 122 bp, Homo sapiens
  misc_feature (61)..(62): /note="This region represents a CpG dinucleotide"
  misc_feature (61)..(61): /note="Nucleotide may be methylated to form 5-methylcytosine"
ccagtgcctagaatagtgcctgacacaaagcaaataattaatacgcactgaatgagcaaacgacagacaggcattagctcatttcctgtagtcttgccggggtaggtctgctgcagctttat

SEQ ID NO: 24805 - DNA, 122 bp, Homo sapiens
  misc_feature (61)..(62): /note="This region represents a CpG dinucleotide"
  misc_feature (61)..(61): /note="Nucleotide may be methylated to form 5-methylcytosine"
gacttgcagatgaattatatatgagtgagaaaacaggtctgcatggaatttccactctagcgaggaaggtggatgatacacaaataattgcatgtgtgctagcattgtccatgggcaatgag

SEQ ID NO: 24806 - DNA, 122 bp, Homo sapiens
  misc_feature (61)..(62): /note="This region represents a CpG dinucleotide"
  misc_feature (61)..(61): /note="Nucleotide may be methylated to form 5-methylcytosine"
agtaactagaaaacgattcatctgtgtccatttgccagtggttcttcaacttcctttcagcgtctcaatgcatcataagctgttagtcctgacagaggctttagtgattagtccaatccctt

SEQ ID NO: 24807 - DNA, 122 bp, Homo sapiens
  misc_feature (61)..(62): /note="This region represents a CpG dinucleotide"
  misc_feature (61)..(61): /note="Nucleotide may be methylated to form 5-methylcytosine"
tcggaatgaaatcagctaacatgtgatatccttaatggttttgtagcagaaagacatctacgtgggaagggacgctgctgagtgtttagagaacagacacattcatcattttattgtatttt

SEQ ID NO: 24808 - DNA, 122 bp, Homo sapiens
  misc_feature (61)..(62): /note="This region represents a CpG dinucleotide"
  misc_feature (61)..(61): /note="Nucleotide may be methylated to form 5-methylcytosine"
tggaaggacctctgaggccagcccttcattatacagagacacagggtccccaagagaaagcgaccagctcagagtcacacagcaagaacaggagcctgctgttggctcattcataagcgtca

SEQ ID NO: 24809 - DNA, 122 bp, Homo sapiens
  misc_feature (61)..(62): /note="This region represents a CpG dinucleotide"
  misc_feature (61)..(61): /note="Nucleotide may be methylated to form 5-methylcytosine"
cctgccctattataaataaaaagcaatgtggttatctagcctctggagctggactgcctgcgttagaatctgagctgtggcatttattggggtgtgttgcttattctctttctgtcagagaa

SEQ ID NO: 24810 - DNA, 122 bp, Homo sapiens
  misc_feature (61)..(62): /note="This region represents a CpG dinucleotide"
  misc_feature (61)..(61): /note="Nucleotide may be methylated to form 5-methylcytosine"
tcactatgtgtgtgggtaaagccaggaggcctcgctgccagagcagtgtgctgggaacaacggctgagcatatgtacatgaactaaaaaacactgtagctgtgagctttgtgtgtgagtcac

SEQ ID NO: 24811 - DNA, 122 bp, Homo sapiens
  misc_feature (61)..(62): /note="This region represents a CpG dinucleotide"
  misc_feature (61)..(61): /note="Nucleotide may be methylated to form 5-methylcytosine"
accctgaatattgactgggtagagatttaaacagcatgcatgcaatagaattggcctcatcgccccatctgtagaacacaagcctgtgaaatccagtgtgtctgtgtgacatgcaattagct

SEQ ID NO: 24812 - DNA, 122 bp, Homo sapiens
  misc_feature (61)..(62): /note="This region represents a CpG dinucleotide"
  misc_feature (61)..(61): /note="Nucleotide may be methylated to form 5-methylcytosine"
aacagaacaaccacgatttcagtgcatggcctaaatggatgctgggcctaccctgaaaggcgttaagaattaaaaattcagaagcatgaagcaacagaggctaacccataatagtcattgca

SEQ ID NO: 24813 - DNA, 122 bp, Homo sapiens
  misc_feature (61)..(62): /note="This region represents a CpG dinucleotide"
  misc_feature (61)..(61): /note="Nucleotide may be methylated to form 5-methylcytosine"
cctaggccgttagcccagtctgttttcttggctgcaagttagccacggtggtaagttagccgtccctccttgtttatggagtaagcatccccaggaagccatctgagtaagggtttgtcaag

SEQ ID NO: 24814 - DNA, 122 bp, Homo sapiens
  misc_feature (61)..(62): /note="This region represents a CpG dinucleotide"
  misc_feature (61)..(61): /note="Nucleotide may be methylated to form 5-methylcytosine"
ccttgcttcactctcctcttttgtcatgctggcactgacattcttgtcaatatttaaattcgctcatcccatgccttttcctgacgcccatcggtaaactcccaccttgaatccaaccacct

SEQ ID NO: 24815 - DNA, 122 bp, Homo sapiens
  misc_feature (61)..(62): /note="This region represents a CpG dinucleotide"
  misc_feature (61)..(61): /note="Nucleotide may be methylated to form 5-methylcytosine"
gtgtcttactcattgtcaatttcaggaaattccccaagggatattcctgaatgttgagtccgtctagcttaaaatgactcaagtcatgtagcagttctcccagaattctgtttcatagacta

SEQ ID NO: 24816 - DNA, 122 bp, Homo sapiens
  misc_feature (61)..(62): /note="This region represents a CpG dinucleotide"
  misc_feature (61)..(61): /note="Nucleotide may be methylated to form 5-methylcytosine"
ccatgcctgagttagcagggcagggacacttcacggtgctgagtaatactacctagtacacgcacagcattttgaaggttccccttggtgatttcattacaatcttcatcgctcttggcctg

SEQ ID NO: 24817 - DNA, 122 bp, Homo sapiens
  misc_feature (61)..(62): /note="This region represents a CpG dinucleotide"
  misc_feature (61)..(61): /note="Nucleotide may be methylated to form 5-methylcytosine"
tgccaacaactccatgagggaactgtggttacacaggctcagggcttgcccgaggttcgccgggagccgaggtcctcagtcaggcctgtcagactctgaagcctgtgacctttctgctccac

SEQ ID NO: 24818 - DNA, 122 bp, Homo sapiens
  misc_feature (61)..(62): /note="This region represents a CpG dinucleotide"
  misc_feature (61)..(61): /note="Nucleotide may be methylated to form 5-methylcytosine"
ggattttctgcctgggatgatgcaatttccaggagctcattacaccataaaggagacgcacgccccttttcttaggaaacaatcttctgtctgttggaggtctcttgctctccagtttaaaa

SEQ ID NO: 24819 - DNA, 122 bp, Homo sapiens
  misc_feature (61)..(62): /note="This region represents a CpG dinucleotide"
  misc_feature (61)..(61): /note="Nucleotide may be methylated to form 5-methylcytosine"
tctgagctctcgggcctgtttctgagctccaccctgctgggcagagcagacaaaccagcgcggctcggctcacggactgcacagcttgcttcgtttaaacgtagcctccacacagcccccag

SEQ ID NO: 24820 - DNA, 122 bp, Homo sapiens
  misc_feature (61)..(62): /note="This region represents a CpG dinucleotide"
  misc_feature (61)..(61): /note="Nucleotide may be methylated to form 5-methylcytosine"
cttccctcagctactgcatactattatctgtctactcgtaaatcccttcttattctctatcgtttctcacacattctcactttacttgttttccttaaacattagcttatttcttttatttt

SEQ ID NO: 24821 - DNA, 122 bp, Homo sapiens
  misc_feature (61)..(62): /note="This region represents a CpG dinucleotide"
  misc_feature (61)..(61): /note="Nucleotide may be methylated to form 5-methylcytosine"
gagaatgtttctttgccttttccagcctctagagactgccctcattccgtggcttgtggtcgccttccagtcagcatttgtgtgattctgacctttgcttctaatgacacatctccttctat

SEQ ID NO: 24822 - DNA, 122 bp, Homo sapiens
  misc_feature (61)..(62): /note="This region represents a CpG dinucleotide"
  misc_feature (61)..(61): /note="Nucleotide may be methylated to form 5-methylcytosine"
gcagacgccacctccgatgtccttataaaacgtgtgcgcgggtgctgcgcatgcgtgtgtcgctgggggctgtaggctgggagcctccgggaactcccctcgccaggccaccagccttccta

SEQ ID NO: 24823 - DNA, 122 bp, Homo sapiens
  misc_feature (61)..(62): /note="This region represents a CpG dinucleotide"
  misc_feature (61)..(61): /note="Nucleotide may be methylated to form 5-methylcytosine"
ctgcaaatgacagccgccgtgctgagcgctcactgaagtggaaccgggagatcagaggtccgtctccaagtcgcccttagcggaggcaggagcagatgaactgccaagtaggagtaatagag

SEQ ID NO: 24824 - DNA, 122 bp, Homo sapiens
  misc_feature (61)..(62): /note="This region represents a CpG dinucleotide"
  misc_feature (61)..(61): /note="Nucleotide may be methylated to form 5-methylcytosine"
tcaggcccaggggccgtggtggacagtgttgccaggttagcataacttgaggtctgagcacgtagacacccacttaccctccacctacaaaagaaaatcctgccagagatacactaccaaga

SEQ ID NO: 24825 - DNA, 122 bp, Homo sapiens
  misc_feature (61)..(62): /note="This region represents a CpG dinucleotide"
  misc_feature (61)..(61): /note="Nucleotide may be methylated to form 5-methylcytosine"
gtcgagaggcaccttcactgccatctactcccaccttcttcctgatgcttgaaatctgtccgtgatcccaggtcagtgattgctcgaggctgtgacagggacactctcagacagcagcccac

SEQ ID NO: 24826 - DNA, 122 bp, Homo sapiens
  misc_feature (61)..(62): /note="This region represents a CpG dinucleotide"
  misc_feature (61)..(61): /note="Nucleotide may be methylated to form 5-methylcytosine"
acatctcatcttcctgtttacctgcattatgagttggacaaataaattgtagctcctctccgtcttgccatgtttcctgtttagaactttcaggcatcccgtggcatttacagaaggctctg

SEQ ID NO: 24827 - DNA, 122 bp, Homo sapiens
  misc_feature (61)..(62): /note="This region represents a CpG dinucleotide"
  misc_feature (61)..(61): /note="Nucleotide may be methylated to form 5-methylcytosine"
agccttgaagaagattccagagccttctgaaacctcagtttcagaccctagttttgcaatcgcttaactcctgatgtatcagttaagattataaaagccttgaagaaggttccagttccttc

SEQ ID NO: 24828 - DNA, 122 bp, Homo sapiens
  misc_feature (61)..(62): /note="This region represents a CpG dinucleotide"
  misc_feature (61)..(61): /note="Nucleotide may be methylated to form 5-methylcytosine"
caaaacaaataagactctccccagttactcacctagaccaccctgacaaatgtctgtgcgcgtggctccaccaacgataaactgagggctgggacacaactcctgaaagtaatttggaacaa

SEQ ID NO: 24829 - DNA, 122 bp, Homo sapiens
  misc_feature (61)..(62): /note="This region represents a CpG dinucleotide"
  misc_feature (61)..(61): /note="Nucleotide may be methylated to form 5-methylcytosine"
accctagaacttaaggtatatatatatatatatagatgttgtttaaaacaattattgttacgcaagtgctactcagtaaatgagtcagctaaaccagtaaggtgactcaaaaagttgagtct

SEQ ID NO: 24830 - DNA, 122 bp, Homo sapiens
  misc_feature (61)..(62): /note="This region represents a CpG dinucleotide"
  misc_feature (61)..(61): /note="Nucleotide may be methylated to form 5-methylcytosine"
cgggtgccggcaaggtctgtgaggacagtcagacacctgaagtttcctagcaggcggctgcgtgccagtgaccagccatgcgcaggaggggaggtgcgggggaggaggttcacaggaacaga

SEQ ID NO: 24831 - DNA, 122 bp, Homo sapiens
  misc_feature (61)..(62): /note="This region represents a CpG dinucleotide"
  misc_feature (61)..(61): /note="Nucleotide may be methylated to form 5-methylcytosine"
aggcttaaggaaaaaccctgtagatatcaacaagtcataaaaacaggcgtattttctcttcgtctctttcccactgtgtgttttattcttcaatattaacagttctgggaatgtaaatgtat

SEQ ID NO: 24832 - DNA, 122 bp, Homo sapiens
  misc_feature (61)..(62): /note="This region represents a CpG dinucleotide"
  misc_feature (61)..(61): /note="Nucleotide may be methylated to form 5-methylcytosine"
aaggaaggaaggaaggaaggaaacaagtgttggtgaggatgtggagaaattggaaccttgcgtctgctggtgggaatgtgaaatgttagagcctctgtggaaaacagtgtggtggttcctaa

SEQ ID NO: 24833 - DNA, 122 bp, Homo sapiens
  misc_feature (61)..(62): /note="This region represents a CpG dinucleotide"
  misc_feature (61)..(61): /note="Nucleotide may be methylated to form 5-methylcytosine"
agtactcagtacagtcatgtgctgtacaggtttgtagcccaggatccacaggctataccacgtagcctaggtgtgtaggtgatacctacattgaagacttaaaggattcaggggtgaaagct

SEQ ID NO: 24834 - DNA, 122 bp, Homo sapiens
  misc_feature (61)..(62): /note="This region represents a CpG dinucleotide"
  misc_feature (61)..(61): /note="Nucleotide may be methylated to form 5-methylcytosine"
gcataagtctgaggattatgagttctgggggctcaagccaattccgtcattaataaatcacgttactgtgagcaatcatataagccgcgaggctcagtatccacatctgtataaacaggcta

SEQ ID NO: 24835 - DNA, 122 bp, Homo sapiens
  misc_feature (61)..(62): /note="This region represents a CpG dinucleotide"
  misc_feature (61)..(61): /note="Nucleotide may be methylated to form 5-methylcytosine"
acgttattgtgagaatccaatgaggaaacacacgtaatgccttcctgcttcattttcctacggcatcttcaacgcctggaacagcctctggcagacagtggatgttcaataaatacccactg

SEQ ID NO: 24836 - DNA, 122 bp, Homo sapiens
  misc_feature (61)..(62): /note="This region represents a CpG dinucleotide"
  misc_feature (61)..(61): /note="Nucleotide may be methylated to form 5-methylcytosine"
tcactcccaccttccttgtaagctctcctgagtgctctgagatgcttgtcctgctctccacgcaggaactcaaatccatgcagggaaggttaataaaaaccactggtcaggtgctattgact

SEQ ID NO: 24837 - DNA, 122 bp, Homo sapiens
  misc_feature (61)..(62): /note="This region represents a CpG dinucleotide"
  misc_feature (61)..(61): /note="Nucleotide may be methylated to form 5-methylcytosine"
agaacatactgcaggagtgtccactgtaccaagaagggtagaaagggtcaaaagaaagcacgagcctggctttgagcagcctgctttggtaatgtatcccaaggccacagtacaaaagtcaa

SEQ ID NO: 24838 - DNA, 122 bp, Homo sapiens
  misc_feature (61)..(62): /note="This region represents a CpG dinucleotide"
  misc_feature (61)..(61): /note="Nucleotide may be methylated to form 5-methylcytosine"
ttcctctgtgtttgcttttaattcatctactgatctaatctctgtctgtattcaccaagccgccaggcaatgctgtgcttgtcagaatcaaactcatcaaactccttctagagagagagcct

SEQ ID NO: 24839 - DNA, 122 bp, Homo sapiens
  misc_feature (61)..(62): /note="This region represents a CpG dinucleotide"
  misc_feature (61)..(61): /note="Nucleotide may be methylated to form 5-methylcytosine"
gtagccagaaaacctttccgaaagtaattacgagagcacagcaggcaagagcacagcaggcgagtcagacttctggtgacatgaacactcagcctgctgatatgaatttcagttgtcttcat

SEQ ID NO: 24840 - DNA, 122 bp, Homo sapiens
  misc_feature (61)..(62): /note="This region represents a CpG dinucleotide"
  misc_feature (61)..(61): /note="Nucleotide may be methylated to form 5-methylcytosine"
cataagataagtataatgtgtatcatgtcaagagctcagcacagggcctggcccattgtacgactccaccatcaaggcaggaggtcgaatggacatctgtccactctggaaacacacccacc

SEQ ID NO: 24841 - DNA, 122 bp, Homo sapiens
  misc_feature (61)..(62): /note="This region represents a CpG dinucleotide"
  misc_feature (61)..(61): /note="Nucleotide may be methylated to form 5-methylcytosine"
ccctccctcccactcccagcctacagacaagcgcatctctgctgcattcatcgccgcacacgccctaaaaatgtcctcacgtgagtctgtgccagcctgcgcgcaaaccgtgagcccaccgc

SEQ ID NO: 24842 - DNA, 122 bp, Homo sapiens
  misc_feature (61)..(62): /note="This region represents a CpG dinucleotide"
  misc_feature (61)..(61): /note="Nucleotide may be methylated to form 5-methylcytosine"
aaaagagacacagagattttctacaatacagtgtcagaggattagtctttgtttccttttcgtgggaaatatttacaagcggataacacatcttcttaaaagcgccatttaatgctttgtca

SEQ ID NO: 24843 - DNA, 122 bp, Homo sapiens
  misc_feature (61)..(62): /note="This region represents a CpG dinucleotide"
  misc_feature (61)..(61): /note="Nucleotide may be methylated to form 5-methylcytosine"
tccccaaaatgttgccccatatgccttttccttttgatgattttactttgatcctttcaccgtaatccattatagtcacaagtatcactgtatatgctgtaagtcctcctagtgagtcagaa

SEQ ID NO: 24844 - DNA, 122 bp, Homo sapiens
  misc_feature (61)..(62): /note="This region represents a CpG dinucleotide"
  misc_feature (61)..(61): /note="Nucleotide may be methylated to form 5-methylcytosine"
tgattcacagatgaatcagaggccctatgagtagagagcttctcctgaagtcacacagctcgtgagtggtggagcaatgacaggcacatgactctccaggtccctagtccagttttctgggt

SEQ ID NO: 24845 - DNA, 122 bp, Homo sapiens
  misc_feature (61)..(62): /note="This region represents a CpG dinucleotide"
  misc_feature (61)..(61): /note="Nucleotide may be methylated to form 5-methylcytosine"
tgcagggtcagaatgccccctttttgcatggtaagtggtgctcatgacagtgctgctcctcgtggcagggccatgccagtgtgcaggaggcacacagtaactttgaagtgtgggatttcgcc

SEQ ID NO: 24846 - DNA, 122 bp, Homo sapiens
  misc_feature (61)..(62): /note="This region represents a CpG dinucleotide"
  misc_feature (61)..(61): /note="Nucleotide may be methylated to form 5-methylcytosine"
attatccaacacatattttcttattttgccacaaatttccacttaacaaataaaaaaaggcgaatgctgttttgcaatcagaaagtgaatttcttttgtggtagcgtacacgtggttcatgt

SEQ ID NO: 24847 - DNA, 122 bp, Homo sapiens
  misc_feature (61)..(62): /note="This region represents a CpG dinucleotide"
  misc_feature (61)..(61): /note="Nucleotide may be methylated to form 5-methylcytosine"
agaccagtcacacctggcctatctgatggtctagacatacacttttaagaatatcaacaacgggaaatgcaggctgggcacagtggctcatgcctgtaatcccagcattttgcaaggccaag

SEQ ID NO: 24848 - DNA, 122 bp, Homo sapiens
  misc_feature (61)..(62): /note="This region represents a CpG dinucleotide"
  misc_feature (61)..(61): /note="Nucleotide may be methylated to form 5-methylcytosine"
ggtccctattctgacacaaggggatcccacagcacccccaccacctcaccaccatgcttgcggtgctgtgacacaccatggtctgcccttggagcaagtcccaaaggccagcctcatccctt

SEQ ID NO: 24849 - DNA, 122 bp, Homo sapiens
  misc_feature (61)..(62): /note="This region represents a CpG dinucleotide"
  misc_feature (61)..(61): /note="Nucleotide may be methylated to form 5-methylcytosine"
tgatgtgcagaggtgaagtttctgttcccctttgggtacttccttctttctctttctattcgcattctttgccactgccccagctgttccctgccgtggcattaaactatcaaaggatgaag

SEQ ID NO: 24850 - DNA, 122 bp, Homo sapiens
  misc_feature (61)..(62): /note="This region represents a CpG dinucleotide"
  misc_feature (61)..(61): /note="Nucleotide may be methylated to form 5-methylcytosine"
cctgagcctttctccctcagtcttcctgtttgtgttcagtggttaatattatcctctccacgtataaaatttgaattcagcaggaccttgtaagacacatgcgtttcattttaagctacatc

SEQ ID NO: 24851 - DNA, 122 bp, Homo sapiens
  misc_feature (61)..(62): /note="This region represents a CpG dinucleotide"
  misc_feature (61)..(61): /note="Nucleotide may be methylated to form 5-methylcytosine"
tgtaatactctaaattatagttcaataatttttttcaattctttttcctggcctatcctccgcctccatccaggtgtctcaccttctactcaccatacaagctatctactaaatttcacctg

SEQ ID NO: 24852 - DNA, 122 bp, Homo sapiens
  misc_feature (61)..(62): /note="This region represents a CpG dinucleotide"
  misc_feature (61)..(61): /note="Nucleotide may be methylated to form 5-methylcytosine"
ttcacacacataaagagtagcagccaaaacagataactgaagaattcccttggcagcctgcgctgagccccggggctgttcgtgctcccagccctctttctatcctcacatggtgtggtcct

SEQ ID NO: 24853 - DNA, 122 bp, Homo sapiens
  misc_feature (61)..(62): /note="This region represents a CpG dinucleotide"
  misc_feature (61)..(61): /note="Nucleotide may be methylated to form 5-methylcytosine"
acagtttccactcaaggactaggaactgaatctctgcacccttaaaaccactctcttagccgggcgcggtggctcatacctgtaatcccagcactttgggaggccaaggcaggtggatcacg

SEQ ID NO: 24854 - DNA, 122 bp, Homo sapiens
  misc_feature (61)..(62): /note="This region represents a CpG dinucleotide"
  misc_feature (61)..(61): /note="Nucleotide may be methylated to form 5-methylcytosine"
acagccagtgaccagaggctgcttgttctacaagaaagagcactgtcctagccttggggacgcaactagcagagtgaccagagcaaaccatccataaaattatgaccaggccaggcgcagtg

SEQ ID NO: 24855 - DNA, 122 bp, Homo sapiens
  misc_feature (61)..(62): /note="This region represents a CpG dinucleotide"
  misc_feature (61)..(61): /note="Nucleotide may be methylated to form 5-methylcytosine"
tgggatccaatcagcaaggagggggcatgattaaatccaggctgactcagagatggcaggcgaggacagcaaggagagcagacatctgcaaggatttgggcaactcgttagggaggaatttt

SEQ ID NO: 24856 - DNA, 122 bp, Homo sapiens
  misc_feature (61)..(62): /note="This region represents a CpG dinucleotide"
  misc_feature (61)..(61): /note="Nucleotide may be methylated to form 5-methylcytosine"
agagctgtgacttggctgcaggtggctgctgccaaagctggggccttccgggctgggctgcgctggcagctgcatcactaactggtgaaatgacaagccaccttgccagcaccacccggcct

SEQ ID NO: 24857 - DNA, 122 bp, Homo sapiens
  misc_feature (61)..(62): /note="This region represents a CpG dinucleotide"
  misc_feature (61)..(61): /note="Nucleotide may be methylated to form 5-methylcytosine"
ttacattagccagcaaggtcttcggcattactagactaacaggcaggtgactcacttggtcgcccaggctggagtcctgtggtgtgatcttggctcactgcaacctctgcctctcaggttca

SEQ ID NO: 24858 - DNA, 122 bp, Homo sapiens
  misc_feature (61)..(62): /note="This region represents a CpG dinucleotide"
  misc_feature (61)..(61): /note="Nucleotide may be methylated to form 5-methylcytosine"
aaaggaatatagacattatcctgatgaacttccttattttataaccaaaaaagtgagatacgtggtattaattgatcctggtctagaaagcctgtcaaagccaggggttagattcaagaaaa

SEQ ID NO: 24859 - DNA, 122 bp, Homo sapiens
  misc_feature (61)..(62): /note="This region represents a CpG dinucleotide"
  misc_feature (61)..(61): /note="Nucleotide may be methylated to form 5-methylcytosine"
gtgttagtctggtaaattgtctgttgacatattcagttgctgactcacaggcgactcaaacggaacatatcccatgtgaatttcaaatctccctttctgcttcatctaaaatttctcttcca

SEQ ID NO: 24860 - DNA, 122 bp, Homo sapiens
  misc_feature (61)..(62): /note="This region represents a CpG dinucleotide"
  misc_feature (61)..(61): /note="Nucleotide may be methylated to form 5-methylcytosine"
caacttgggacccagagcttccaggcaactgctcaccctctgtcctccctaggccaagggcgtgccctgttttgagagaagaggaaagcagccatatttccagtctgaaccacacatcacac

SEQ ID NO: 24861 - DNA, 122 bp, Homo sapiens
  misc_feature (61)..(62): /note="This region represents a CpG dinucleotide"
  misc_feature (61)..(61): /note="Nucleotide may be methylated to form 5-methylcytosine"
gcccatgccatgctgtcccccaccactccctcagacagaggtccgggagagagaaggagacgtaccgaggctggtcctgatccccttacacaggatgaatcctgttcctgtcacagtggggt

SEQ ID NO: 24862 - DNA, 122 bp, Homo sapiens
  misc_feature (61)..(62): /note="This region represents a CpG dinucleotide"
  misc_feature (61)..(61): /note="Nucleotide may be methylated to form 5-methylcytosine"
ttttaaaaaagaaaaacaggaatagaattaatgctgaactctgaccctttctagcaataacgattattcacccatgaatataggaactaactgggatgaagaaggaagcgtcatttccttaa

SEQ ID NO: 24863 - DNA, 122 bp, Homo sapiens
  misc_feature (61)..(62): /note="This region represents a CpG dinucleotide"
  misc_feature (61)..(61): /note="Nucleotide may be methylated to form 5-methylcytosine"
cctggccaccggctcgcagcccccatgcctcggggcccagtgccgagggtgaggaggggccgatcttgtgtaaagcagagaaactggacctcgtggctgtggcagcaggatggcaccttgct

SEQ ID NO: 24864 - DNA, 122 bp, Homo sapiens
  misc_feature (61)..(62): /note="This region represents a CpG dinucleotide"
  misc_feature (61)..(61): /note="Nucleotide may be methylated to form 5-methylcytosine"
cggcttttgctggtaacctgaaacttaagtagtcacatgtagttcaaccagctccaaacacggttgtacagtggtaattattctgcagcatttatgggcctaaatttcagtctgaattgcaa

SEQ ID NO: 24865 - DNA, 122 bp, Homo sapiens
  misc_feature (61)..(62): /note="This region represents a CpG dinucleotide"
  misc_feature (61)..(61): /note="Nucleotide may be methylated to form 5-methylcytosine"
gcaagtatcttcacgaggtggtaaaagtaagaagttgtcagtaacacctccctcctccaacggtattaatgaggagttgtcagaagtcttacagactttacaggatgaatttgggcaaatga

SEQ ID NO: 24866 - DNA, 122 bp, Homo sapiens
  misc_feature (61)..(62): /note="This region represents a CpG dinucleotide"
  misc_feature (61)..(61): /note="Nucleotide may be methylated to form 5-methylcytosine"
ataaattgtatgatttcccagaataacacatccatcatcatcaagtatgaggacatgacccgatcctggggtctcacaaggggcttttgggtgtctctgagaggaccatgatgaagactcaa

SEQ ID NO: 24867 - DNA, 122 bp, Homo sapiens
  misc_feature (61)..(62): /note="This region represents a CpG dinucleotide"
  misc_feature (61)..(61): /note="Nucleotide may be methylated to form 5-methylcytosine"
aaaaaaatatgttattaacacattgaaagtatttctacatgccagggctagggtaccattcgttaccatatctccagcagccagtgcagcattgactcctaacaaatatgctttgaaccaaa

SEQ ID NO: 24868 - DNA, 122 bp, Homo sapiens
  misc_feature (61)..(62): /note="This region represents a CpG dinucleotide"
  misc_feature (61)..(61): /note="Nucleotide may be methylated to form 5-methylcytosine"
ttaacaaagcaacagtagtttctataagccactacctctggaaggtcgtttttatctctccgcttccctgtctttgaggcgatactgttcacaactcttttaatgtttggataaagtccaag

SEQ ID NO: 24869 - DNA, 122 bp, Homo sapiens
  misc_feature (61)..(62): /note="This region represents a CpG dinucleotide"
  misc_feature (61)..(61): /note="Nucleotide may be methylated to form 5-methylcytosine"
tagctgaaaacctttccccatccaatatccattaactctcagtggaaacacagatgtgcacgtccactggagcagcactaaagggctctctgcagtccagcaccctcccaactgcccctacc

SEQ ID NO: 24870 - DNA, 122 bp, Homo sapiens
  misc_feature (61)..(62): /note="This region represents a CpG dinucleotide"
  misc_feature (61)..(61): /note="Nucleotide may be methylated to form 5-methylcytosine"
tccagcgtggccagaattttaattcaggcagtctagatccagagcctcttaatcactgtacggtgttgcctccaacctggaggaactggtctgaagagaacaagtattaccacgagtgttaa

SEQ ID NO: 24871 - DNA, 122 bp, Homo sapiens
  misc_feature (61)..(62): /note="This region represents a CpG dinucleotide"
  misc_feature (61)..(61): /note="Nucleotide may be methylated to form 5-methylcytosine"
ggaggtgtttcggaaaaactccgaagattccacttgagaaaatcatcggccttcagacaacgtctatgccagataatgctaccaaatcacaaccttgcctttcctccctactgctgttctga

SEQ ID NO: 24872 - DNA, 122 bp, Homo sapiens
  misc_feature (61)..(62): /note="This region represents a CpG dinucleotide"
  misc_feature (61)..(61): /note="Nucleotide may be methylated to form 5-methylcytosine"
ccagtgccgtcctaaatcagttccagctagtgaccatttgtgccagtggtgccacaggcacggggaagacctctgtaatcttcacctaatcagatgatacctaaaccagtctggcaacaagg

SEQ ID NO: 24873 - DNA, 122 bp, Homo sapiens
  misc_feature (61)..(62): /note="This region represents a CpG dinucleotide"
  misc_feature (61)..(61): /note="Nucleotide may be methylated to form 5-methylcytosine"
tggcatagctgatagaaaaggtaacctgacatttggcagcattaaaagaagtatggcttccggagcaagggaggtgacattcctcacactgtggcctgacctgcagcctacctgtggtctga

SEQ ID NO: 24874 - DNA, 122 bp, Homo sapiens
  misc_feature (61)..(62): /note="This region represents a CpG dinucleotide"
  misc_feature (61)..(61): /note="Nucleotide may be methylated to form 5-methylcytosine"
cttctctgtgctatcttcctttctttgctctgatgaatactcctggtggcttggtacgagcgtaaagccagagaggttatgtagccgaaattcctaagaagggagaactatttcactgtgca

SEQ ID NO: 24875 - DNA, 122 bp, Homo sapiens
  misc_feature (61)..(62): /note="This region represents a CpG dinucleotide"
  misc_feature (61)..(61): /note="Nucleotide may be methylated to form 5-methylcytosine"
tatgaattggaggggcagggacacatttcagcctgtaacagatgggttgggttacctctgcggaagactaaaatctgagggttagtcactgaggtttcacttctccagtgaaactggctgag

SEQ ID NO: 24876 - DNA, 122 bp, Homo sapiens
  misc_feature (61)..(62): /note="This region represents a CpG dinucleotide"
  misc_feature (61)..(61): /note="Nucleotide may be methylated to form 5-methylcytosine"
agttgttttttcaacaaccagcaacttctgtgtgtttcctgattcagtgccctctaaccacgctgcatgcctggtctgtggcagacttttagtgctaagctctaagcccagcaggatcagat

SEQ ID NO: 24877 - DNA, 122 bp, Homo sapiens
  misc_feature (61)..(62): /note="This region represents a CpG dinucleotide"
  misc_feature (61)..(61): /note="Nucleotide may be methylated to form 5-methylcytosine"
gatcaaccagctgtttggccagcaggttcccgaagccagagtcacagcctgtgatgaagacgtacttctctgagaggttgccaaccagattgcagttcttgaaccagcgatacataaatgag

SEQ ID NO: 24878 - DNA, 122 bp, Homo sapiens
  misc_feature (61)..(62): /note="This region represents a CpG dinucleotide"
  misc_feature (61)..(61): /note="Nucleotide may be methylated to form 5-methylcytosine"
gctgttactaacatgccctttcttggctctcatgaactctaaggtgcctggtcagttctacgtgctcagctggtggttttactttggtcataaatggtcccagcatgtcacttctccttatt

SEQ ID NO: 24879 - DNA, 122 bp, Homo sapiens
  misc_feature (61)..(62): /note="This region represents a CpG dinucleotide"
  misc_feature (61)..(61): /note="Nucleotide may be methylated to form 5-methylcytosine"
caaaggagtaacaccacagcattgttcaggaaaggcaattatacagggacccaaaaaatgcgggcctagcaattagctcttgagcttgccccagaggtaaaatttggagtgaatggattgca

SEQ ID NO: 24880 - DNA, 122 bp, Homo sapiens
  misc_feature (61)..(62): /note="This region represents a CpG dinucleotide"
  misc_feature (61)..(61): /note="Nucleotide may be methylated to form 5-methylcytosine"
tgatagactatggggaacagaccaagatttattttttagccagcattttccccttgcaaccgtaagtcattcttcctcagaaggcaaggtggggcaagtgattctaatgtgcttcgctccaa

SEQ ID NO: 24881 - DNA, 122 bp, Homo sapiens
  misc_feature (61)..(62): /note="This region represents a CpG dinucleotide"
  misc_feature (61)..(61): /note="Nucleotide may be methylated to form 5-methylcytosine"
gtccgcgacccctcgcgccccccaccccgcgactagcggctgcccccggcccgcgccccccgccaggccaaccgccgccaaatcctcgcgccagccttccgggtgggcacagccactgtggt

SEQ ID NO: 24882 - DNA, 122 bp, Homo sapiens
  misc_feature (61)..(62): /note="This region represents a CpG dinucleotide"
  misc_feature (61)..(61): /note="Nucleotide may be methylated to form 5-methylcytosine"
caagcctttcatccactgctcttacaggtacctaatgtcctggcacaggggttgtaataccgttgggaattgcccatgatattgcagtcgctgtgccaggacattaggtaatctgaattaga

SEQ ID NO: 24883 - DNA, 122 bp, Homo sapiens
  misc_feature (61)..(62): /note="This region represents a CpG dinucleotide"
  misc_feature (61)..(61): /note="Nucleotide may be methylated to form 5-methylcytosine"
aaccagcagtgctccatcccttctcagctggggcctgagaacacgtgagtgagaaagtttcgccctgttgcctcagccgaaagctagggaatcctagctcacatatcaggttccttaagcaa

SEQ ID NO: 24884 - DNA, 122 bp, Homo sapiens
  misc_feature (61)..(62): /note="This region represents a CpG dinucleotide"
  misc_feature (61)..(61): /note="Nucleotide may be methylated to form 5-methylcytosine"
ctgacacccaagctcccccagagccaccatgagtgacggcctactgctctcagccgagtgcgtgctatgtgtcaggcactttgccaagagctccgtgcctgttttatttactcaacttgtcc

SEQ ID NO: 24885 - DNA, 122 bp, Homo sapiens
  misc_feature (61)..(62): /note="This region represents a CpG dinucleotide"
  misc_feature (61)..(61): /note="Nucleotide may be methylated to form 5-methylcytosine"
tgacacaagtacacagaatcaaccagctccccagccctcctggttgtgtggttttcaccacgtgacttttgcagctccccaaactgagtaggcagagtcggttctcccacgtggctctgaat

SEQ ID NO: 24886 - DNA, 122 bp, Homo sapiens
  misc_feature (61)..(62): /note="This region represents a CpG dinucleotide"
  misc_feature (61)..(61): /note="Nucleotide may be methylated to form 5-methylcytosine"
ggaatgagaaagcacagtgaatcactcagggactagcaacagtgggaagctgttagtacccgtagtcctgaaggcgtgaggggagggaacagtgttaccagagcctgataggagctgagcca

SEQ ID NO: 24887 - DNA, 122 bp, Homo sapiens
  misc_feature (61)..(62): /note="This region represents a CpG dinucleotide"
  misc_feature (61)..(61): /note="Nucleotide may be methylated to form 5-methylcytosine"
ttacacacattgactcattcaatccttacaataaccctcttaaggtatatgctactatgacgcccatggcaatgatgaagcaactctggcattaaaaggtgaaatgacttactcaagattgc

SEQ ID NO: 24888 - DNA, 122 bp, Homo sapiens
  misc_feature (61)..(62): /note="This region represents a CpG dinucleotide"
  misc_feature (61)..(61): /note="Nucleotide may be methylated to form 5-methylcytosine"
gtggatataaatggctttgacacttccttaccatcaaatgtctaaatagactccactgggcgtaactgggtactaccaaaaaagggcacttgtatgaccccgtgttctggtttcttgagctt

SEQ ID NO: 24889 - DNA, 122 bp, Homo sapiens
  misc_feature (61)..(62): /note="This region represents a CpG dinucleotide"
  misc_feature (61)..(61): /note="Nucleotide may be methylated to form 5-methylcytosine"
aagaactgaactttttctgagtgggtcaaggaagaagccaaaccatgatagggtttatggcgcagtcttcctgcagtttgccagcattcaccccagacagaggtgcacagtaaaaacctcaa

SEQ ID NO: 24890 - DNA, 122 bp, Homo sapiens
  misc_feature (61)..(62): /note="This region represents a CpG dinucleotide"
  misc_feature (61)..(61): /note="Nucleotide may be methylated to form 5-methylcytosine"
taagacaccactggagctttgcagggcacagcttgcacaagtatgagccagccctgagggcgcaggttggtctgaatccagagaaccctttcctttccacgctaccgctaccggcagataca

SEQ ID NO: 24891 - DNA, 122 bp, Homo sapiens
  misc_feature (61)..(62): /note="This region represents a CpG dinucleotide"
  misc_feature (61)..(61): /note="Nucleotide may be methylated to form 5-methylcytosine"
atatgtagtgtaaatggctgactgttactgatctaacccaggccatttaacccatataagcgcaccctcctggtgcaattcagcaagttcttttgtcctcggtatttcctacaatccagcag

SEQ ID NO: 24892 - DNA, 122 bp, Homo sapiens
  misc_feature (61)..(62): /note="This region represents a CpG dinucleotide"
  misc_feature (61)..(61): /note="Nucleotide may be methylated to form 5-methylcytosine"
ctttcctggagaggaggccgcgggagtcatcgcggggcagatcctggaggccagcaaggccgcccctcctcctaagtggcactgattgacaggggagaaagacagaggcttgttccccagaa

SEQ ID NO: 24893 - DNA, 122 bp, Homo sapiens
  misc_feature (61)..(62): /note="This region represents a CpG dinucleotide"
  misc_feature (61)..(61): /note="Nucleotide may be methylated to form 5-methylcytosine"
ttgataactagtcacacatttcaatggggaagaacagttggtatctcaggtgactgaggtcggagaagtgccatttccaaagatgggattagggacccaagacaatgcctagggtatgattg

SEQ ID NO: 24894 - DNA, 122 bp, Homo sapiens
  misc_feature (61)..(62): /note="This region represents a CpG dinucleotide"
  misc_feature (61)..(61): /note="Nucleotide may be methylated to form 5-methylcytosine"
agtcatgagaaaaccggccacagggcatcaggccagcactcctcaaaactgtcaaagtcacggaaaacaggaaagtccaagaaactgtcagagaccagaggacaatgaatagagaggtgaca

SEQ ID NO: 24895 - DNA, 122 bp, Homo sapiens
  misc_feature (61)..(62): /note="This region represents a CpG dinucleotide"
  misc_feature (61)..(61): /note="Nucleotide may be methylated to form 5-methylcytosine"
gagctgagcaaaatgaggattcaaattacaggagcgcagagtaaacttttggcatattagcggacatcttggtaagtttctcaggacagtgtttttcagagatgacaggattaaagagaaac

SEQ ID NO: 24896 - DNA, 122 bp, Homo sapiens
  misc_feature (61)..(62): /note="This region represents a CpG dinucleotide"
  misc_feature (61)..(61): /note="Nucleotide may be methylated to form 5-methylcytosine"
tggtctgaaaatattaaatggaaaattccagaaaaatgaattggtaaattttaaattgcacgctgttctgggtagcccgactggtaggtgaatcatccctttgcccagtatatctgtctata

SEQ ID NO: 24897 - DNA, 122 bp, Homo sapiens
  misc_feature (61)..(62): /note="This region represents a CpG dinucleotide"
  misc_feature (61)..(61): /note="Nucleotide may be methylated to form 5-methylcytosine"
acaagattggcatggaagagataaagctaaggtggagttcaacagctcaggaggaggagtcgaagaaacctgggtttaggcaggtaggttctcatgtgaaagtcagtcagagaaatctcagt

SEQ ID NO: 24898 - DNA, 122 bp, Homo sapiens
  misc_feature (61)..(62): /note="This region represents a CpG dinucleotide"
  misc_feature (61)..(61): /note="Nucleotide may be methylated to form 5-methylcytosine"
aagaggcccagcttctacacctggctctgctattagctcacactgtgactttggacaagtcgctccacctgctttggcctcaactttctgatctataaaattaaaggattagaaaagatgat

SEQ ID NO: 24899 - DNA, 122 bp, Homo sapiens
  misc_feature (61)..(62): /note="This region represents a CpG dinucleotide"
  misc_feature (61)..(61): /note="Nucleotide may be methylated to form 5-methylcytosine"
gagatcatcacactttagcttggttgccttactctctaaagactcattctactacatcagcgcatatacactcttatgtacgagtgttatgcaaaactaaacaaaataccaagtgtcacttc

SEQ ID NO: 24900 - DNA, 122 bp, Homo sapiens
  misc_feature (61)..(62): /note="This region represents a CpG dinucleotide"
  misc_feature (61)..(61): /note="Nucleotide may be methylated to form 5-methylcytosine"
cctaagcacttactaagtgccaggccaagcactcctgcaaggagctggagggtgagtcaccgacaatacgcgagccttataagggaactaacaattaaaactgtggccttctaaacaaaacg

SEQ ID NO: 24901 - DNA, 122 bp, Homo sapiens
  misc_feature (61)..(62): /note="This region represents a CpG dinucleotide"
  misc_feature (61)..(61): /note="Nucleotide may be methylated to form 5-methylcytosine"
agcgccttccacctggggaaaggcagccagcgctccgaggacatgggctccccgctccagcgcctgacacctcgcaggcctgcaggtgtcaggcctgcctcgctactcccctgcactccctc

SEQ ID NO: 24902 - DNA, 122 bp, Homo sapiens
  misc_feature (61)..(62): /note="This region represents a CpG dinucleotide"
  misc_feature (61)..(61): /note="Nucleotide may be methylated to form 5-methylcytosine"
ctctgtcccaaagccgtcaatagccaggatgacatctccaggacacaggttggcagctgccgccttgcttcctggtgtaatctggaagaaatcatggcactatttaaaaaccaacatcccgc

SEQ ID NO: 24903 - DNA, 122 bp, Homo sapiens
  misc_feature (61)..(62): /note="This region represents a CpG dinucleotide"
  misc_feature (61)..(61): /note="Nucleotide may be methylated to form 5-methylcytosine"
tatcattggtgttcatgttcccagaggaaggaacacttcagtagagcccggaaagtgaaacgggaattcacaaggcagggcatgtttaggctttctgattaatgtctgccaaccagtaggca

SEQ ID NO: 24904 - DNA, 122 bp, Homo sapiens
  misc_feature (61)..(62): /note="This region represents a CpG dinucleotide"
  misc_feature (61)..(61): /note="Nucleotide may be methylated to form 5-methylcytosine"
cgaactgcctcaaccatccacctctgttcttaagcccatcagcacccaccacaaggcggacgctgacatccaagaggcagctcagtttaaattaagaagttgagttatcatctctaactaga

SEQ ID NO: 24905 - DNA, 122 bp, Homo sapiens
  misc_feature (61)..(62): /note="This region represents a CpG dinucleotide"
  misc_feature (61)..(61): /note="Nucleotide may be methylated to form 5-methylcytosine"
aatggtcatccctcactgccctgtggagtttacactgtaaagggcaaggcggactataaacgggattacaataagatctgtgaggtgaattaaagggcatgtgtaaataaagacagagtctc

SEQ ID NO: 24906 - DNA, 122 bp, Homo sapiens
  misc_feature (61)..(62): /note="This region represents a CpG dinucleotide"
  misc_feature (61)..(61): /note="Nucleotide may be methylated to form 5-methylcytosine"
agcttgtggtaaagatgaaaggtatgaattcgtgtgaagcggttagaaccatggagtaagcgtgtgttggctgtcatcatcactgaggtaggtgctgtcatcaccctcattttacatgtaga

SEQ ID NO: 24907 - DNA, 122 bp, Homo sapiens
  misc_feature (61)..(62): /note="This region represents a CpG dinucleotide"
  misc_feature (61)..(61): /note="Nucleotide may be methylated to form 5-methylcytosine"
ctccccaggaatcctgctgcctgctgagaaacatggtcagcaagtcccgtgagtgtcatccgagggctcccccaccctggaggacaggcctcagaagccgtcttcagcaggatcctgggacc

SEQ ID NO: 24908 - DNA, 122 bp, Homo sapiens
  misc_feature (61)..(62): /note="This region represents a CpG dinucleotide"
  misc_feature (61)..(61): /note="Nucleotide may be methylated to form 5-methylcytosine"
ctcctgggctcaagccctcctcccaatccttggcctcacaaagcaccgggattacgtgtgcgagccgccaaactcagccacaagtcagtatttaaaggaaaaatggggcagttcctaagttg

SEQ ID NO: 24909 - DNA, 122 bp, Homo sapiens
  misc_feature (61)..(62): /note="This region represents a CpG dinucleotide"
  misc_feature (61)..(61): /note="Nucleotide may be methylated to form 5-methylcytosine"
tcagcggagatgcagtgcctgtcaagggtttggcttgcctgcagccatacaagatttttacgagcctcaacaatacgataaacactacacacctagctcccaggatgggctctcaaaattgc

SEQ ID NO: 24910 - DNA, 122 bp, Homo sapiens
  misc_feature (61)..(62): /note="This region represents a CpG dinucleotide"
  misc_feature (61)..(61): /note="Nucleotide may be methylated to form 5-methylcytosine"
aggaagcgctgggggccctggaggctaggcgcctggctctcagggaaagtgactgcctaacgcaacacaataggcacattacagcccttgccttagagggagattagggtatctgcctagca

SEQ ID NO: 24911 - DNA, 122 bp, Homo sapiens
  misc_feature (61)..(62): /note="This region represents a CpG dinucleotide"
  misc_feature (61)..(61): /note="Nucleotide may be methylated to form 5-methylcytosine"
tgttggatccacaaaactaaagaaccaaaaggtatctttgacatccccttgactgttttacggaaacacttactgaaggctagagatactacagagcctgtccgtccaaggtcatacacaaa

SEQ ID NO: 24912 - DNA, 122 bp, Homo sapiens
  misc_feature (61)..(62): /note="This region represents a CpG dinucleotide"
  misc_feature (61)..(61): /note="Nucleotide may be methylated to form 5-methylcytosine"
tttgtggaaggggagaaagaaagagctgggaaagatcacctgtctatgtctatttttgtacgcatctaatttggagcctctcgttctgcagtgggaattttggctccagatcttggtctggt

SEQ ID NO: 24913 - DNA, 122 bp, Homo sapiens
  misc_feature (61)..(62): /note="This region represents a CpG dinucleotide"
  misc_feature (61)..(61): /note="Nucleotide may be methylated to form 5-methylcytosine"
taaatcacataactgtgatttaatgttatgtgttggtatagagctactctagcttgcaaacgtgagggaagctgtgaagaatagtaaatataatttcttcttgctaaacatcacaaggcttc

SEQ ID NO: 24914 - DNA, 122 bp, Homo sapiens
  misc_feature (61)..(62): /note="This region represents a CpG dinucleotide"
  misc_feature (61)..(61): /note="Nucleotide may be methylated to form 5-methylcytosine"
aaacacatatttttctagtgatacatgcaaagaaaactcaaacagggtgagggcacagagcgttccctcagaaccctggacatgctattctggtggcctcagtaatgcagtgatactgtatg

SEQ ID NO: 24915 - DNA, 122 bp, Homo sapiens
  misc_feature (61)..(62): /note="This region represents a CpG dinucleotide"
  misc_feature (61)..(61): /note="Nucleotide may be methylated to form 5-methylcytosine"
acctaactgacagcagcaatactgatgtttatttcactcccttaggcaattcttacactacgtgaccttccaaaggcaaaaagagttggttaataacacagacatagcatcactgtcttcaa

SEQ ID NO: 24916 - DNA, 122 bp, Homo sapiens
  misc_feature (61)..(62): /note="This region represents a CpG dinucleotide"
  misc_feature (61)..(61): /note="Nucleotide may be methylated to form 5-methylcytosine"
cacggctttcctctcacatttctaattgtttcctgttcctgtaatatgcaacagcttttccgtctgattacaaaggtaataatgcaaaaaattcacagaagtataacaaaggagggaaaaat

SEQ ID NO: 24917 - DNA, 122 bp, Homo sapiens
  misc_feature (61)..(62): /note="This region represents a CpG dinucleotide"
  misc_feature (61)..(61): /note="Nucleotide may be methylated to form 5-methylcytosine"
acaacagccactggaattgccgacgggtgcacggccaaacgcttggcaaagtgcgtggcgcgctgggattcccccacaaaaggcagtttaccaaaaaattattaagagaacccaggaaaatt

SEQ ID NO: 24918 - DNA, 122 bp, Homo sapiens
  misc_feature (61)..(62): /note="This region represents a CpG dinucleotide"
  misc_feature (61)..(61): /note="Nucleotide may be methylated to form 5-methylcytosine"
gactacaagcgtgagtcaccatgcccagcccaattcctttgcttaaagaattcagatgagcgtagtgtttattattttttctgtccatgtctgttccagtcatgaacttcaagagttaccta

SEQ ID NO: 24919 - DNA, 122 bp, Homo sapiens
  misc_feature (61)..(62): /note="This region represents a CpG dinucleotide"
  misc_feature (61)..(61): /note="Nucleotide may be methylated to form 5-methylcytosine"
atgcagatgagtactttgaaaaattaagagagacatttactttttaagctaccactaagacggtctctgaccggataaagataacttgagcaggcgaatttgtttaacaaaggtggtgacat

SEQ ID NO: 24920 - DNA, 122 bp, Homo sapiens
  misc_feature (61)..(62): /note="This region represents a CpG dinucleotide"
  misc_feature (61)..(61): /note="Nucleotide may be methylated to form 5-methylcytosine"
tctggacctctcgtttagaccttctctcctgactgccagatggcatgtcccactgtcctccggtgtacatctccaaattgtcccacaggcatttatctcagatgaagtttcaggttggactc

SEQ ID NO: 24921 - DNA, 122 bp, Homo sapiens
  misc_feature (61)..(62): /note="This region represents a CpG dinucleotide"
  misc_feature (61)..(61): /note="Nucleotide may be methylated to form 5-methylcytosine"
attacctccaggagaagctgcagcgggacctggaggcggagcatgtggaggtggaggacacgaccttcaacctgtagcttccgagtcctggtggtgtcagctgctgcttcagagacaccagc

SEQ ID NO: 24922 - DNA, 122 bp, Homo sapiens
  misc_feature (61)..(62): /note="This region represents a CpG dinucleotide"
  misc_feature (61)..(61): /note="Nucleotide may be methylated to form 5-methylcytosine"
atgtttagatacctgtcatgaagatttaagcacaatgaatgagacactggagaagctctgcgtttgaagtcaacaaaactggattctggtcctccatgacattaaaaagtctcacaattttt

SEQ ID NO: 24923 - DNA, 122 bp, Homo sapiens
  misc_feature (61)..(62): /note="This region represents a CpG dinucleotide"
  misc_feature (61)..(61): /note="Nucleotide may be methylated to form 5-methylcytosine"
caccaatttccgttagtcatggcgtgagacctgttcctatgggatgttaattctctgatgcgttgaaaagcctagcaaagacgttccacaggatctggacaccaaagagaatgcctctatga

SEQ ID NO: 24924 - DNA, 122 bp, Homo sapiens
  misc_feature (61)..(62): /note="This region represents a CpG dinucleotide"
  misc_feature (61)..(61): /note="Nucleotide may be methylated to form 5-methylcytosine"
tgcccagtctgtgcctgaccaggcccaggtgacagagcatgaatgtgacaaagagcaaaacgtgtatgaacaatcccagccctgtccaaagcaccatggctgtttcgggggctctcagcaag

SEQ ID NO: 24925 - DNA, 122 bp, Homo sapiens
  misc_feature (61)..(62): /note="This region represents a CpG dinucleotide"
  misc_feature (61)..(61): /note="Nucleotide may be methylated to form 5-methylcytosine"
taaatctccctcactcatgtcacctcttcaggacatttccttacagacaccttccttgatcgtcacttgggctgtagtgcaaaacagaaggcatgctcaagtgggagtggccaaggagagtt

SEQ ID NO: 24926 - DNA, 122 bp, Homo sapiens
  misc_feature (61)..(62): /note="This region represents a CpG dinucleotide"
  misc_feature (61)..(61): /note="Nucleotide may be methylated to form 5-methylcytosine"
taaacagcccagcgtggtgattcctattcacttagtagcctccccatctagaatatactccgtgatctttcttgatggccagactgtgtaaaattcatacagtgtttactacagggatcccc

SEQ ID NO: 24927 - DNA, 122 bp, Homo sapiens
  misc_feature (61)..(62): /note="This region represents a CpG dinucleotide"
  misc_feature (61)..(61): /note="Nucleotide may be methylated to form 5-methylcytosine"
accgtgcccagccaggaagcacaatgtaaattccataaatgtttcatcaccagcagctgacgccctccacccagcctctatgatctgccatccctggctgtggttcctggtcacctcatggt

SEQ ID NO: 24928 - DNA, 122 bp, Homo sapiens
  misc_feature (61)..(62): /note="This region represents a CpG dinucleotide"
  misc_feature (61)..(61): /note="Nucleotide may be methylated to form 5-methylcytosine"
aacctagacattcatctctagatctgtcccactaccctttcagctcgatttccccagtcgcgccagttagacaaacacacaaacaaataaacagagtggggtctggggcctctctccaaatg

SEQ ID NO: 24929 - DNA, 122 bp, Homo sapiens
  misc_feature (61)..(62): /note="This region represents a CpG dinucleotide"
  misc_feature (61)..(61): /note="Nucleotide may be methylated to form 5-methylcytosine"
ctgtccaaaagcaaactcagtggtccttcccaggtctctggccacttctggccccgggaacgtagagcggcttctgcatctccctgactcacctcggagtaggctctgtgggagacaccgcc

SEQ ID NO: 24930 - DNA, 122 bp, Homo sapiens
  misc_feature (61)..(62): /note="This region represents a CpG dinucleotide"
  misc_feature (61)..(61): /note="Nucleotide may be methylated to form 5-methylcytosine"
aagtgcatttctccttgtgactcatgaagaacagtgcactcaccctcctcactgagcaggcgtcctgttttactgtgataggaaaattcatggcagcaccacgctgtgtgaggtgagtctgc

SEQ ID NO: 24931 - DNA, 122 bp, Homo sapiens
  misc_feature (61)..(62): /note="This region represents a CpG dinucleotide"
  misc_feature (61)..(61): /note="Nucleotide may be methylated to form 5-methylcytosine"
ctaaagttcttgtttttgtcactcacattaccttcagctatgaggcttgtgggcttctctcgtggttttattcattttttcacttttaacagttttactgaggtataactgagataccatac

SEQ ID NO: 24932 - DNA, 122 bp, Homo sapiens
  misc_feature (61)..(62): /note="This region represents a CpG dinucleotide"
  misc_feature (61)..(61): /note="Nucleotide may be methylated to form 5-methylcytosine"
cagcctcatgatcttgagtgagcaggagagccaggagcacccacttccagaggcagggaacgggaggaaggagagctaacaccttcggagcacttactgtcatcttcattgtctcccgtaat

SEQ ID NO: 24933 - DNA, 122 bp, Homo sapiens
  misc_feature (61)..(62): /note="This region represents a CpG dinucleotide"
  misc_feature (61)..(61): /note="Nucleotide may be methylated to form 5-methylcytosine"
gcctgggcaacagagtgagactccatctcaaaagaaaaaaaaaaaagaacccatcaaggacgtagatctgttatcagaaatgagtcaggacttcgggctgataacagagttaatgtgcaaac

SEQ ID NO: 24934 - DNA, 122 bp, Homo sapiens
  misc_feature (61)..(62): /note="This region represents a CpG dinucleotide"
  misc_feature (61)..(61): /note="Nucleotide may be methylated to form 5-methylcytosine"
tgttcgagtgtcattagtaatagcacctcctctctcaaaagtgccttatttgaggctgggcgtggtgactcacacccataatcccagcactttgggaggccagggtgggaggatcacttgaa

SEQ ID NO: 24935 - DNA, 122 bp, Homo sapiens
  misc_feature (61)..(62): /note="This region represents a CpG dinucleotide"
  misc_feature (61)..(61): /note="Nucleotide may be methylated to form 5-methylcytosine"
ctgccttcagctctaaacaggtaactgtgcaacaggccatggctgtctttatctcctctgcgtccctttccagatgtgggcgcagcatctaggacattataggtgctatgtatttattgaac

SEQ ID NO: 24936 - DNA, 122 bp, Homo sapiens
  misc_feature (61)..(62): /note="This region represents a CpG dinucleotide"
  misc_feature (61)..(61): /note="Nucleotide may be methylated to form 5-methylcytosine"
ggagaaaatttacaatctggccccacaacctcatgtgactttttatagaacaaggaagtacgggagcctatatgcaacagtgacaatgtgctgtggccgctcagtgttggccacaacagctt

SEQ ID NO: 24937 - DNA, 122 bp, Homo sapiens
  misc_feature (61)..(62): /note="This region represents a CpG dinucleotide"
  misc_feature (61)..(61): /note="Nucleotide may be methylated to form 5-methylcytosine"
cttcttctgcaatgcctgcttggaaactgcatgggccaatttcccttccttccctcattacgacatttattccaggctgtctaatgtggtgagctgtgtctgggtctacaattctacaattc

SEQ ID NO: 24938 - DNA, 122 bp, Homo sapiens
  misc_feature (61)..(62): /note="This region represents a CpG dinucleotide"
  misc_feature (61)..(61): /note="Nucleotide may be methylated to form 5-methylcytosine"
atttttttcagggcctgaaattatgctttcatgttctcatgccaaagaaaggtaagttcgcgtgagcctgggatctgtcctgccataggaattcttcacaggaactcttcacaggatttctg

SEQ ID NO: 24939 - DNA, 122 bp, Homo sapiens
  misc_feature (61)..(62): /note="This region represents a CpG dinucleotide"
  misc_feature (61)..(61): /note="Nucleotide may be methylated to form 5-methylcytosine"
gcaaacaaatctggccatgatgaattactggttgtctctccaatgcaccaggctctcttacgctccttagtatttgcatgtgctgtttcttcctggattgctaccccacccttcatctgctt

SEQ ID NO: 24940 - DNA, 122 bp, Homo sapiens
  misc_feature (61)..(62): /note="This region represents a CpG dinucleotide"
  misc_feature (61)..(61): /note="Nucleotide may be methylated to form 5-methylcytosine"
agcctcccacctagaatatctaatctaggccctgggtgatttcctttcatcactgacaaccgcagcaacattagtaatcataatgaacccttacaagcatgattcatatgtacctggcatga

SEQ ID NO: 24941 - DNA, 122 bp, Homo sapiens
  misc_feature (61)..(62): /note="This region represents a CpG dinucleotide"
  misc_feature (61)..(61): /note="Nucleotide may be methylated to form 5-methylcytosine"
tacttaaaattttggctactacatttttttcaggctttctgaaacctacatgtgaatcatcggaggatatttgctgaatgaattcagaataggcaacctaatccacttggaaagcactaggc

SEQ ID NO: 24942 - DNA, 122 bp, Homo sapiens
  misc_feature (61)..(62): /note="This region represents a CpG dinucleotide"
  misc_feature (61)..(61): /note="Nucleotide may be methylated to form 5-methylcytosine"
agaagggctgctacaactgaagggatttgtgagctcaaaatccctcctgctatctctctacgagcaagtgcaaaaactgctgacatttgttcttgtgtgtgaaaccagttttgaagttacaa

SEQ ID NO: 24943 - DNA, 122 bp, Homo sapiens
  misc_feature (61)..(62): /note="This region represents a CpG dinucleotide"
  misc_feature (61)..(61): /note="Nucleotide may be methylated to form 5-methylcytosine"
aaacgttgatttccagagcagtcgtctgagattatggcccaggggtacatgtgacataagcggttgactagggaattacagattatgacagcactcttgagtagctgaaaagctaaaaatag

SEQ ID NO: 24944 - DNA, 122 bp, Homo sapiens
  misc_feature (61)..(62): /note="This region represents a CpG dinucleotide"
  misc_feature (61)..(61): /note="Nucleotide may be methylated to form 5-methylcytosine"
atccgcctgcctcggcctcccaaagtgctgggattacaggtgtgagccaccatacccagccgcttccaagctcatttctatggctgaagaatgccctcaggcagagagaagcaggaggttgt

SEQ ID NO: 24945 - DNA, 122 bp, Homo sapiens
  misc_feature (61)..(62): /note="This region represents a CpG dinucleotide"
  misc_feature (61)..(61): /note="Nucleotide may be methylated to form 5-methylcytosine"
gcccaggccttaagacagtttgatattcagttttgttatttaggtctgggttagggataccgccagagagcatccaaacatttctgtggttgggaaggctagttatctgtgagcattccaga

SEQ ID NO: 24946 - DNA, 122 bp, Homo sapiens
  misc_feature (61)..(62): /note="This region represents a CpG dinucleotide"
  misc_feature (61)..(61): /note="Nucleotide may be methylated to form 5-methylcytosine"
actggcataagtcattatctgtggtggaaaaggctgcctggcatgtagctgttaactcagcggttgcccaagtgtggagattcagcattacctaggaatgtataagaagaactctgggcttc

SEQ ID NO: 24947 - DNA, 122 bp, Homo sapiens
  misc_feature (61)..(62): /note="This region represents a CpG dinucleotide"
  misc_feature (61)..(61): /note="Nucleotide may be methylated to form 5-methylcytosine"
aagtgttagcaatcattctgctactgtgtgcaaggctttatccatgctctaccaaccacccgtgatgggtctgtcaaccagaaagtatctgaggcagggctccatcaatttagaagtttatt

SEQ ID NO: 24948 - DNA, 122 bp, Homo sapiens
  misc_feature (61)..(62): /note="This region represents a CpG dinucleotide"
  misc_feature (61)..(61): /note="Nucleotide may be methylated to form 5-methylcytosine"
ttaagtatccttactgctcaggtttatccagcagcttcagttcttcttctttggatgtctcgtaatactttcttattttaaccagctcatcctcttgggctctctgtatcaaaatagaaaac

SEQ ID NO: 24949 - DNA, 122 bp, Homo sapiens
  misc_feature (61)..(62): /note="This region represents a CpG dinucleotide"
  misc_feature (61)..(61): /note="Nucleotide may be methylated to form 5-methylcytosine"
actaagtaataatatgctttcagctggagtgaagttgaagtgaatcagataggcgagttacggtacaatgataaatgctaagtattaatagagacaatgaggaaatgaagagaatatttaat

SEQ ID NO: 24950 - DNA, 122 bp, Homo sapiens
  misc_feature (61)..(62): /note="This region represents a CpG dinucleotide"
  misc_feature (61)..(61): /note="Nucleotide may be methylated to form 5-methylcytosine"
ccagagctccctaaccctcatctcctgggagctgctatctcttcctcctttgtaaaggagcggtcgatttacatggagatactgaatcaaagagagaaacattccaagggtgagatacactc

SEQ ID NO: 24951 - DNA, 122 bp, Homo sapiens
  misc_feature (61)..(62): /note="This region represents a CpG dinucleotide"
  misc_feature (61)..(61): /note="Nucleotide may be methylated to form 5-methylcytosine"
gggaagggaactgctgacataaacgaaattccatttgttcatttgttcattcaacaaacccgagtgcctggtacaatactggttgctgatgcaatactaggatccaactatgagtaaggtgg

SEQ ID NO: 24952 - DNA, 122 bp, Homo sapiens
  misc_feature (61)..(62): /note="This region represents a CpG dinucleotide"
  misc_feature (61)..(61): /note="Nucleotide may be methylated to form 5-methylcytosine"
gaaaacaactattcaccttaataagagagaaattctgtcatttgcaacaacagggatgtacgtgaaggacattatgctaagtgaagtaagcgaggcacaggaagagaaataccacatgttct

SEQ ID NO: 24953 - DNA, 122 bp, Homo sapiens
  misc_feature (61)..(62): /note="This region represents a CpG dinucleotide"
  misc_feature (61)..(61): /note="Nucleotide may be methylated to form 5-methylcytosine"
cttgttgcctaattttaagttacttaacttctctgtatctccattgcttcatctgtaaaacgggcgtaattacagaaccagcctcacaagggttgtgaaaatgtaatgagtaactacataaa

SEQ ID NO: 24954 - DNA, 122 bp, Homo sapiens
  misc_feature (61)..(62): /note="This region represents a CpG dinucleotide"
  misc_feature (61)..(61): /note="Nucleotide may be methylated to form 5-methylcytosine"
cactagtgcctgttttcctgactctgacttcctgggtctcggcaccacagatagcttctgcgtttctctacaggagggaagaagcaatttccaattctgagcttcatgagggaggagaataa

SEQ ID NO: 24955 - DNA, 122 bp, Homo sapiens
  misc_feature (61)..(62): /note="This region represents a CpG dinucleotide"
  misc_feature (61)..(61): /note="Nucleotide may be methylated to form 5-methylcytosine"
ataatttgttgagaggttttgttttgaggagcatgaaggatctgatgtaagaactaccaccggtgctggtgatcacaatatatgcagctgattaaagttcctcatttatgctacctacatcc

SEQ ID NO: 24956 - DNA, 122 bp, Homo sapiens
  misc_feature (61)..(62): /note="This region represents a CpG dinucleotide"
  misc_feature (61)..(61): /note="Nucleotide may be methylated to form 5-methylcytosine"
ggtggctaccatataggactgtgcagacctaggagttcaagtgaaagcaaacagaaaatacgggcagcatcaacatttgctgtagcaaagcataaggggattatgtttaagaagggatcaaa

SEQ ID NO: 24957 - DNA, 122 bp, Homo sapiens
  misc_feature (61)..(62): /note="This region represents a CpG dinucleotide"
  misc_feature (61)..(61): /note="Nucleotide may be methylated to form 5-methylcytosine"
ctatgattgggccttttctatatttgtaaacaatcattcagtacaaacgcagcatcttaacgcatgacaaggaagaacagatgagggttttcacctcgagatgactttcagagtagccttat

SEQ ID NO: 24958 - DNA, 122 bp, Homo sapiens
  misc_feature (61)..(62): /note="This region represents a CpG dinucleotide"
  misc_feature (61)..(61): /note="Nucleotide may be methylated to form 5-methylcytosine"
ttgtcactgctcagctttagcttccacatctgttaaatgggcttaatcctactaagatttcgaggctgaagaaagccatatatagtgtgtggtatgggggctcattaagtcctagttctttt

SEQ ID NO: 24959 - DNA, 122 bp, Homo sapiens
  misc_feature (61)..(62): /note="This region represents a CpG dinucleotide"
  misc_feature (61)..(61): /note="Nucleotide may be methylated to form 5-methylcytosine"
gaagggcctgatgtcaggccttgtaaatagaagaagtttggattttactttgagtaggaccggaagccaaaggaggtttctgagcaggaagtagtctcagtctggctgctgttagggaactg

SEQ ID NO: 24960 - DNA, 122 bp, Homo sapiens
  misc_feature (61)..(62): /note="This region represents a CpG dinucleotide"
  misc_feature (61)..(61): /note="Nucleotide may be methylated to form 5-methylcytosine"
cagggaagtggctaaatgacaaagtatctgaacttctgcttaagacaaaggacacaattacgcaaaaagctatgcacgggaagataacatggcaggaatgaaaacagctatcaataaggata

SEQ ID NO: 24961 - DNA, 122 bp, Homo sapiens
  misc_feature (61)..(62): /note="This region represents a CpG dinucleotide"
  misc_feature (61)..(61): /note="Nucleotide may be methylated to form 5-methylcytosine"
tagtaaatagtattgcataaacacacacaaacacacaatgcagtaatttctcacattttgcgtaatcaaactgggataatgactttatgattcccttatataactataaagaaatatttcat

SEQ ID NO: 24962 - DNA, 122 bp, Homo sapiens
  misc_feature (61)..(62): /note="This region represents a CpG dinucleotide"
  misc_feature (61)..(61): /note="Nucleotide may be methylated to form 5-methylcytosine"
tatgctatgtacttcaccctccactgacacatctgatcccattatgtgcctgacctttaacggtcatcaaatcaaagtcattctggtcagttcagtctgggcctgacacatgcccaggtcac

SEQ ID NO: 24963 - DNA, 122 bp, Homo sapiens
  misc_feature (61)..(62): /note="This region represents a CpG dinucleotide"
  misc_feature (61)..(61): /note="Nucleotide may be methylated to form 5-methylcytosine"
cagggtccaccagctgttaagacagccatgaagctcaggtcttccggcagctacctggcacgacttacaggcatcagggatttcatgtgaacccctggcaataattacaattattccgtagt

SEQ ID NO: 24964 - DNA, 122 bp, Homo sapiens
  misc_feature (61)..(62): /note="This region represents a CpG dinucleotide"
  misc_feature (61)..(61): /note="Nucleotide may be methylated to form 5-methylcytosine"
gtgatgtacggtagagcgtcattctctaaacttacttatacaactcgcagattccagagacgaggaaatggaaaggaaccactccacttcctctcgaatctgaaataaacatttgaactaga

SEQ ID NO: 24965 - DNA, 122 bp, Homo sapiens
  misc_feature (61)..(62): /note="This region represents a CpG dinucleotide"
  misc_feature (61)..(61): /note="Nucleotide may be methylated to form 5-methylcytosine"
ggacacaccatcagtctccagagtccaggctctgaaacacaccacggccaaacctgtcctcgcctgtcattcctcccttgtcaggaggatatagaacccagtgattaagggtgtgggcgggc

SEQ ID NO: 24966 - DNA, 122 bp, Homo sapiens
  misc_feature (61)..(62): /note="This region represents a CpG dinucleotide"
  misc_feature (61)..(61): /note="Nucleotide may be methylated to form 5-methylcytosine"
gggggctacagggaagcactgacagatccacagctcgagggctggcacaacccagcaggacggagtggctccaatgggaacctgtcctgttggatgttttaatcaacccaggatgaggacag

SEQ ID NO: 24967 - DNA, 122 bp, Homo sapiens
  misc_feature (61)..(62): /note="This region represents a CpG dinucleotide"
  misc_feature (61)..(61): /note="Nucleotide may be methylated to form 5-methylcytosine"
ctccctcctctgccctggaccaaaataccagggtggggcagaagtgtagctcagatttctcgggctatatttaggggccaccccacactctcaggtagggagtgaaacttgtagctcagtga

SEQ ID NO: 24968 - DNA, 122 bp, Homo sapiens
  misc_feature (61)..(62): /note="This region represents a CpG dinucleotide"
  misc_feature (61)..(61): /note="Nucleotide may be methylated to form 5-methylcytosine"
tttgcaacttctcaaagttaaacacaatcataaaacccagtaatgacactcttaggtattcgctacaaagaaatgaaaacaaacgtccatcatacaaagacattttcatgcagctttattca

SEQ ID NO: 24969 - DNA, 122 bp, Homo sapiens
  misc_feature (61)..(62): /note="This region represents a CpG dinucleotide"
  misc_feature (61)..(61): /note="Nucleotide may be methylated to form 5-methylcytosine"
aggtgaatggctgagacttcgaagagatttcctcccggaaaggccgagcattgagccatccggggggtggggacagctggactaagaaagggcttagtaggcctgacctttcatgtccccat

SEQ ID NO: 24970 - DNA, 122 bp, Homo sapiens
  misc_feature (61)..(62): /note="This region represents a CpG dinucleotide"
  misc_feature (61)..(61): /note="Nucleotide may be methylated to form 5-methylcytosine"
cttgtgcaaataaatcattgcatgaataatacttcagtcaagactgtgaaggcttgtacacggaaaagaacaaacacaaaagtcgagggaaagtacagaatccacctgctgacaaaaaactg

SEQ ID NO: 24971 - DNA, 122 bp, Homo sapiens
  misc_feature (61)..(62): /note="This region represents a CpG dinucleotide"
  misc_feature (61)..(61): /note="Nucleotide may be methylated to form 5-methylcytosine"
ctttattcaacaggcgtggcttcctgaagcgtaaagccacttcacagacggtggccacagcggcacctcggccagagccatgcggccatcagagaccctgggcggccgggcagagggcttgg

SEQ ID NO: 24972 - DNA, 122 bp, Homo sapiens
  misc_feature (61)..(62): /note="This region represents a CpG dinucleotide"
  misc_feature (61)..(61): /note="Nucleotide may be methylated to form 5-methylcytosine"
tactttctaataagcctccaaaggacaatggtgattagtatttcctgggtttctctaccccgcagctgaagacctgcagatggatccagcacaaaagggacctgccatgcacactctctgga

SEQ ID NO: 24973 - DNA, 122 bp, Homo sapiens
  misc_feature (61)..(62): /note="This region represents a CpG dinucleotide"
  misc_feature (61)..(61): /note="Nucleotide may be methylated to form 5-methylcytosine"
cttggcagctggccttctcctgggacacactgaccttgcagtaccttacatttgaaatgtcgacatgtgccttccaacactgggtctcctgggaacagtcactgccggggcatatgtgcagg

SEQ ID NO: 24974 - DNA, 122 bp, Homo sapiens
  misc_feature (61)..(62): /note="This region represents a CpG dinucleotide"
  misc_feature (61)..(61): /note="Nucleotide may be methylated to form 5-methylcytosine"
acaaaggggccctgtgtgagctcggtgtgggaacgcggggccccgccacgggcgtgaaatcggcagcggcccctggcgagggccaggcggtgcgggcgccccggcaggcacagtgaggctgg

SEQ ID NO: 24975 - DNA, 122 bp, Homo sapiens
  misc_feature (61)..(62): /note="This region represents a CpG dinucleotide"
  misc_feature (61)..(61): /note="Nucleotide may be methylated to form 5-methylcytosine"
catcctccttgctctgagtgtagctgttctgtttgttttaaagagcagtgtggttcaaaacggtcccacagcgtgggctatgaacctgctatggcaagaacctgttttgcaaatatttctaa

SEQ ID NO: 24976 - DNA, 122 bp, Homo sapiens
  misc_feature (61)..(62): /note="This region represents a CpG dinucleotide"
  misc_feature (61)..(61): /note="Nucleotide may be methylated to form 5-methylcytosine"
atgttgttgggaaggagaaaggaaggatttggtaacacaatagcatcctaaactctgaaacggatcgcctgggttcaaacccatgtcttgtcatttaatgacctgagtaagtaagttaacac

SEQ ID NO: 24977 - DNA, 122 bp, Homo sapiens
  misc_feature (61)..(62): /note="This region represents a CpG dinucleotide"
  misc_feature (61)..(61): /note="Nucleotide may be methylated to form 5-methylcytosine"
atgactagtgcaggtccagtagcaattgccaggggcgtgccttgggcagatgagcttaagcgaggtcactaaattaatcatcagaaaggggtggtaccaggacttagactaatcagtagtca

SEQ ID NO: 24978 - DNA, 122 bp, Homo sapiens
  misc_feature (61)..(62): /note="This region represents a CpG dinucleotide"
  misc_feature (61)..(61): /note="Nucleotide may be methylated to form 5-methylcytosine"
acaacctcccttgtttgctaactattctcaggctaaaaagagagtgctgacaaaccacagcggaagtcaggagctgagaaaacatgttgtgtggagtaagaaagggtcaccctgttcaaaag

SEQ ID NO: 24979 - DNA, 122 bp, Homo sapiens
  misc_feature (61)..(62): /note="This region represents a CpG dinucleotide"
  misc_feature (61)..(61): /note="Nucleotide may be methylated to form 5-methylcytosine"
gtggcatcagaatgcacttagcaagaaatgttcgagaggagaaagaggtttgtaatatgtcgcttttatagaggggggaactttaagtataaaagatcatccactcctctgcgggcttgttt

SEQ ID NO: 24980 - DNA, 122 bp, Homo sapiens
  misc_feature (61)..(62): /note="This region represents a CpG dinucleotide"
  misc_feature (61)..(61): /note="Nucleotide may be methylated to form 5-methylcytosine"
gtgaaaccagtacatggtggaaaaaatgagaacagtgattgcctctggggtaggaggtgacggcaactgactgagaaggaggacaactgaaatttctaggatgatagaaatattcaatctct

SEQ ID NO: 24981 - DNA, 122 bp, Homo sapiens
  misc_feature (61)..(62): /note="This region represents a CpG dinucleotide"
  misc_feature (61)..(61): /note="Nucleotide may be methylated to form 5-methylcytosine"
aaactattgtgcactctgtgcttgtaaatgtccctcgtccaaaccgctactcctggagcccgtctggcagaggatgtggtctgtttttgatgtcccccctcccgcccccctggtgtgaacgt

SEQ ID NO: 24982 - DNA, 122 bp, Homo sapiens
  misc_feature (61)..(62): /note="This region represents a CpG dinucleotide"
  misc_feature (61)..(61): /note="Nucleotide may be methylated to form 5-methylcytosine"
aggcaaactagaaaggtagacagagacccgatcacggttggtgtccaaggctctctgaaacgtttttatgttattctctaggaggcatgatcatcttctgatgtctgacatttaatatctct

SEQ ID NO: 24983 - DNA, 122 bp, Homo sapiens
  misc_feature (61)..(62): /note="This region represents a CpG dinucleotide"
  misc_feature (61)..(61): /note="Nucleotide may be methylated to form 5-methylcytosine"
atcacccaggtgctgctggatgaggaaagacaggccatggcgaaatcccgccggctggagcgcagcaccaacagcttcagttactcatcataccacaccctggaggaggtaggtctggccgg

SEQ ID NO: 24984 - DNA, 122 bp, Homo sapiens
  misc_feature (61)..(62): /note="This region represents a CpG dinucleotide"
  misc_feature (61)..(61): /note="Nucleotide may be methylated to form 5-methylcytosine"
gattattatttaaaacatcgctgtggtatcagtctcactcagacaagtaatgacagtcaacgcaagatgaatgcagaaagctatgtatggtgatttaaggagggaaatcaaaataccactct

SEQ ID NO: 24985 - DNA, 122 bp, Homo sapiens
  misc_feature (61)..(62): /note="This region represents a CpG dinucleotide"
  misc_feature (61)..(61): /note="Nucleotide may be methylated to form 5-methylcytosine"
gtctttattattacaaatagttctgcattgagcagcctggtaccgatgccacattttgcacgtgtgcagattacctgtagtagaattgggaggggatggtgtgtgcagctttagaggtgcca

SEQ ID NO: 24986 - DNA, 122 bp, Homo sapiens
  misc_feature (61)..(62): /note="This region represents a CpG dinucleotide"
  misc_feature (61)..(61): /note="Nucleotide may be methylated to form 5-methylcytosine"
atcacatttctgactgttcaaagggatttcagtttcttttagaaattgggtgttgtaaagcgatgtttctattcctagattgtcagttgaatataacttagacttgttgttcttgtctttct

SEQ ID NO: 24987 - DNA, 122 bp, Homo sapiens
  misc_feature (61)..(62): /note="This region represents a CpG dinucleotide"
  misc_feature (61)..(61): /note="Nucleotide may be methylated to form 5-methylcytosine"
ctcagaaaaatagcttgtgggagcccagtgtttggactctataagtaaccttggacttttcgggaggtgcttggtgcttggggtgagggattagaatgggatgagactgaaggcagaaaggc

SEQ ID NO: 24988 - DNA, 122 bp, Homo sapiens
  misc_feature (61)..(62): /note="This region represents a CpG dinucleotide"
  misc_feature (61)..(61): /note="Nucleotide may be methylated to form 5-methylcytosine"
ctcaagtgatacacccatctcagcctcctaaagtgctgggattgcaggcgtgagccaccacgccaggccgtgagcccttatttgagaacaccaactactgctgtgatgaggcagaggggcca

SEQ ID NO: 24989 - DNA, 122 bp, Homo sapiens
  misc_feature (61)..(62): /note="This region represents a CpG dinucleotide"
  misc_feature (61)..(61): /note="Nucleotide may be methylated to form 5-methylcytosine"
gaatccagccccttggcatgggacctggagcctcgactacacagcatcttctgggtctggcgtctgccagcacctgatctctttcctcattcccagctttgtgacacttctcaacttgcggc

SEQ ID NO: 24990 - DNA, 122 bp, Homo sapiens
  misc_feature (61)..(62): /note="This region represents a CpG dinucleotide"
  misc_feature (61)..(61): /note="Nucleotide may be methylated to form 5-methylcytosine"
tagcagtcttacattttaaagaaacaggctcaaaatagcacaacacatatttctaggtttcgatcattaaaattcttcatctgtggactactagccataaataatcaacttgagaaaataaa

SEQ ID NO: 24991 - DNA, 122 bp, Homo sapiens
  misc_feature (61)..(62): /note="This region represents a CpG dinucleotide"
  misc_feature (61)..(61): /note="Nucleotide may be methylated to form 5-methylcytosine"
tctcaaaaaaaaaaaaaaaaaaaaaaaagcaaaggctaggtgcagtggctcacaccagtacgccagtaatcctcagtaatcctaggactttgagaggctgaggtgtgtggatcgcttgagcc

SEQ ID NO: 24992 - DNA, 122 bp, Homo sapiens
  misc_feature (61)..(62): /note="This region represents a CpG dinucleotide"
  misc_feature (61)..(61): /note="Nucleotide may be methylated to form 5-methylcytosine"
aaagggaaatcactgttgtacgccaccatgtttgacaggaagtcctttaaaagtaggtggcgttatggtataacaacaaagagcatgggatttggagtgagatacacccggctgcgaatctg

SEQ ID NO: 24993 - DNA, 122 bp, Homo sapiens
  misc_feature (61)..(62): /note="This region represents a CpG dinucleotide"
  misc_feature (61)..(61): /note="Nucleotide may be methylated to form 5-methylcytosine"
tcataatccaggatctgtttgacagcttctgacttcagtgtgactatccatgtcagatgacgtcattgctaaaccatgtgtcttgggttgtgagaaaagctaggagaatcaacaggaaggcc

SEQ ID NO: 24994 - DNA, 122 bp, Homo sapiens
  misc_feature (61)..(62): /note="This region represents a CpG dinucleotide"
  misc_feature (61)..(61): /note="Nucleotide may be methylated to form 5-methylcytosine"
gctctttagcggtgctcattggtggcgccacaggactaactcagaactcactttcataagcgcaccacaagccaccactgggggaaatgagtcattctaatctagaaaatgctatgattgat

SEQ ID NO: 24995 - DNA, 122 bp, Homo sapiens
  misc_feature (61)..(62): /note="This region represents a CpG dinucleotide"
  misc_feature (61)..(61): /note="Nucleotide may be methylated to form 5-methylcytosine"
caggcttttttctgtaatacatgatacaaaacaatcagtaacactcaattccaggaccaacgagaagggagacattataaaaaatttaaaatgtctcaaaattctgtcactacagattggcc

SEQ ID NO: 24996 - DNA, 122 bp, Homo sapiens
  misc_feature (61)..(62): /note="This region represents a CpG dinucleotide"
  misc_feature (61)..(61): /note="Nucleotide may be methylated to form 5-methylcytosine"
caatgtctactgtggttaactttatttatcagctgccataaaatatgcaccaggatcagtcgctgtgttcaaggaccatctcttgaaaacaagaacatgaaattctgactcaccgatagttg

SEQ ID NO: 24997 - DNA, 122 bp, Homo sapiens
  misc_feature (61)..(62): /note="This region represents a CpG dinucleotide"
  misc_feature (61)..(61): /note="Nucleotide may be methylated to form 5-methylcytosine"
gtgggaggaaaccggtgcccgacccagaggacgaatgctggtgaggctgcaggtttggtgcggggacaggagggctggcttggacaagctggtctgagctgcttgtgagccagatgttgaga

SEQ ID NO: 24998 - DNA, 122 bp, Homo sapiens
  misc_feature (61)..(62): /note="This region represents a CpG dinucleotide"
  misc_feature (61)..(61): /note="Nucleotide may be methylated to form 5-methylcytosine"
gaatttgtgtgtgtgtggtggtggtggaggtaggggtggattgaataaatggaatgtttacgttttttattttgtttaaaacgtgctctctgccctggtgtttctgacatgttcacaaacac

SEQ ID NO: 24999 - DNA, 122 bp, Homo sapiens
  misc_feature (61)..(62): /note="This region represents a CpG dinucleotide"
  misc_feature (61)..(61): /note="Nucleotide may be methylated to form 5-methylcytosine"
tatgccaacacacaagcctccatgcctggaaccagcccaagccccagacctcttgcaccacgctctgaggacaatgggtcccagagaacagcaagttagctcctgactccatctgcagctcc

SEQ ID NO: 25000 - DNA, 122 bp, Homo sapiens
  misc_feature (61)..(62): /note="This region represents a CpG dinucleotide"
  misc_feature (61)..(61): /note="Nucleotide may be methylated to form 5-methylcytosine"
atcagagtggtttgtccactagatggtggccatctacaccatccctggccctctcctatccggaaacctttattctgagcacccagtaacataggtggaagttgaagttttgtttttcaggt

SEQ ID NO: 25001 - DNA, 122 bp, Homo sapiens
  misc_feature (61)..(62): /note="This region represents a CpG dinucleotide"
  misc_feature (61)..(61): /note="Nucleotide may be methylated to form 5-methylcytosine"
ccttccataccgaaagaattctgagtggttcttgacctgggctgcagtctagcgtcaccacgtaaaagggagtatatggagcacctggacatatcatgcatgactggtgggagtataaagtg

SEQ ID NO: 25002 - DNA, 122 bp, Homo sapiens
  misc_feature (61)..(62): /note="This region represents a CpG dinucleotide"
  misc_feature (61)..(61): /note="Nucleotide may be methylated to form 5-methylcytosine"
gctcaaggagaagacaggtcattaccttttccagtgtaagtgagcaacccgcttggcccccgaaactccaccacatccccaaccttcaggctatccaggtactgagacatcttccctccctc

SEQ ID NO: 25003 - DNA, 122 bp, Homo sapiens
  misc_feature (61)..(62): /note="This region represents a CpG dinucleotide"
  misc_feature (61)..(61): /note="Nucleotide may be methylated to form 5-methylcytosine"
cactgaaaatatgagcatgcccgcctggctagtaggcatctgtaagagtgtcgccaggcccgcgccagctgaggcctcagactagccaggcaagagccgtctgaccagttggctggcggtgg

SEQ ID NO: 25004 - DNA, 122 bp, Homo sapiens
  misc_feature (61)..(62): /note="This region represents a CpG dinucleotide"
  misc_feature (61)..(61): /note="Nucleotide may be methylated to form 5-methylcytosine"
aggagaagtggatcaaaggcatgaggcaggcaggcccaacaaagttgttactgacagagccgtaggcaggaagggagtggctggcgatgagtctggaaaaggagttgtgattgggagtcatt

SEQ ID NO: 25005 - DNA, 122 bp, Homo sapiens
  misc_feature (61)..(62): /note="This region represents a CpG dinucleotide"
  misc_feature (61)..(61): /note="Nucleotide may be methylated to form 5-methylcytosine"
aatcaccatctaagtcatcccacagaactaaccctaaaaataagcatctaccttgcttctcgcaatatcttggaacactaatttttcaacacttcctccgtggttatccatgaggaggctca

SEQ ID NO: 25006 - DNA, 122 bp, Homo sapiens
  misc_feature (61)..(62): /note="This region represents a CpG dinucleotide"
  misc_feature (61)..(61): /note="Nucleotide may be methylated to form 5-methylcytosine"
caaaggaggaatttgaggcccagaaaagttaagtactttgtccaagtcacacagctggtacgtggaagagccaagattccaactcaggccatctgactcatcggccaggtttctcaccagca

SEQ ID NO: 25007 - DNA, 122 bp, Homo sapiens
  misc_feature (61)..(62): /note="This region represents a CpG dinucleotide"
  misc_feature (61)..(61): /note="Nucleotide may be methylated to form 5-methylcytosine"
ttccctttactgggtattgaagttagtcattcgtgacctttcccattggggttctgatttcgcaaacatgcattgggctctttaatgcatattatctcatctattgctcacaatagcccttt

SEQ ID NO: 25008 - DNA, 122 bp, Homo sapiens
  misc_feature (61)..(62): /note="This region represents a CpG dinucleotide"
  misc_feature (61)..(61): /note="Nucleotide may be methylated to form 5-methylcytosine"
ccacttcctcatctgaaacgatggcagtagaactttcccttcctgggttgtcaaagtccacggagaagcataaaccatgattcacatgtgaggaagtacgcaggtttcaaaggccctggtct

SEQ ID NO: 25009 - DNA, 122 bp, Homo sapiens
  misc_feature (61)..(62): /note="This region represents a CpG dinucleotide"
  misc_feature (61)..(61): /note="Nucleotide may be methylated to form 5-methylcytosine"
agccatcttctggctatgattgccacgtgtctgaaaatactaacaaggtttctaacaagacgagtcattttcgtgcctttgaactgagtcaggtatagttacctgtgaatgagtaacaccca

SEQ ID NO: 25010 - DNA, 122 bp, Homo sapiens
  misc_feature (61)..(62): /note="This region represents a CpG dinucleotide"
  misc_feature (61)..(61): /note="Nucleotide may be methylated to form 5-methylcytosine"
ccacccagattcaggactgacccaggcctggccaatcaacaaggccttcagggactggtacgtgtcagttaaatgagtcagtcccaggacgctttgtatatatatgtatgtaatatttgtaa

SEQ ID NO: 25011 - DNA, 122 bp, Homo sapiens
  misc_feature (61)..(62): /note="This region represents a CpG dinucleotide"
  misc_feature (61)..(61): /note="Nucleotide may be methylated to form 5-methylcytosine"
ttttccctctggtctcatagctgctttctttcaggagttggcccaagtcaccatagcagacgagtcccctgaggatcatttgcatacaggtggcagagtgttctaaaaataggatcaacact

SEQ ID NO: 25012 - DNA, 122 bp, Homo sapiens
  misc_feature (61)..(62): /note="This region represents a CpG dinucleotide"
  misc_feature (61)..(61): /note="Nucleotide may be methylated to form 5-methylcytosine"
tcctcccagagagaaacttctgcagaagcacaagctcctgggagttctccaaggagggatcgttgaagttcgttgtttttgtataacaattgcatattattcacactttggaaaactcatca

SEQ ID NO: 25013 - DNA, 122 bp, Homo sapiens
  misc_feature (61)..(62): /note="This region represents a CpG dinucleotide"
  misc_feature (61)..(61): /note="Nucleotide may be methylated to form 5-methylcytosine"
ggcagggtgtggtcttgggtgtctggcttctcactctgcgtcatgtgttggagactcagccgtgttgtggagcgtgtttgtttattctttcaaatcctcatgcagcattccattctgtggat

SEQ ID NO: 25014 - DNA, 122 bp, Homo sapiens
  misc_feature (61)..(62): /note="This region represents a CpG dinucleotide"
  misc_feature (61)..(61): /note="Nucleotide may be methylated to form 5-methylcytosine"
agtgatactcccacctcagcctctagagtagctgagactacagacaggagccactatgcccggctgaagttgtgttttagaaaacagctctgatgtagcaaggcggaggcctgaggggtgaa

SEQ ID NO: 25015 - DNA, 122 bp, Homo sapiens
  misc_feature (61)..(62): /note="This region represents a CpG dinucleotide"
  misc_feature (61)..(61): /note="Nucleotide may be methylated to form 5-methylcytosine"
accaggaaagtgaaatctgggaatgtgaggagcctaccatgtcctgcgggctggaccacacggtatggaggagaagaggaggaacggaagctggcaggtcagcagaggctgagttctgacag

SEQ ID NO: 25016 - DNA, 122 bp, Homo sapiens
  misc_feature (61)..(62): /note="This region represents a CpG dinucleotide"
  misc_feature (61)..(61): /note="Nucleotide may be methylated to form 5-methylcytosine"
ttgaactaggagtgaccaatctaaactaaaaaggtcaagcaggggcaggaagttgagtttcgcaatgaaagcattaacaacctgtgctttgggttttgagctgaaaagaaactgttcccagg

SEQ ID NO: 25017 - DNA, 122 bp, Homo sapiens
  misc_feature (61)..(62): /note="This region represents a CpG dinucleotide"
  misc_feature (61)..(61): /note="Nucleotide may be methylated to form 5-methylcytosine"
aactgactggtcagtgagagatgaagagagtccatgtaatcagtgactctcagtggagttcggcagaagctgtactttatgttcaagtgctaaagagctggaaacaagcctggatctttaaa

SEQ ID NO: 25018 - DNA, 122 bp, Homo sapiens
  misc_feature (61)..(62): /note="This region represents a CpG dinucleotide"
  misc_feature (61)..(61): /note="Nucleotide may be methylated to form 5-methylcytosine"
ctaaattgttattcaaggagtttgatttcagccctgcagaaacagccctgagcccagcatcgctgggacaaaggcagaaggggctatcttctgttcaagacctgctggctgacagttggaat

SEQ ID NO: 25019 - DNA, 122 bp, Homo sapiens
  misc_feature (61)..(62): /note="This region represents a CpG dinucleotide"
  misc_feature (61)..(61): /note="Nucleotide may be methylated to form 5-methylcytosine"
ctccccatttcccctctccaccgcccctggtgcccgccatcctttcagtctctatgaatccgactcctctagggacctcacataagtcgagtcttgccgtatctgtcctttcgtgtctggct

SEQ ID NO: 25020 - DNA, 122 bp, Homo sapiens
  misc_feature (61)..(62): /note="This region represents a CpG dinucleotide"
  misc_feature (61)..(61): /note="Nucleotide may be methylated to form 5-methylcytosine"
aaataaataagaatcttatgggaccaccctggcatatgtggttcatctttgaccaaaacacgccattatgaagcatgtgattatattacatggtttagactctgggtgtggttagattccct

SEQ ID NO: 25021 - DNA, 122 bp, Homo sapiens
  misc_feature (61)..(62): /note="This region represents a CpG dinucleotide"
  misc_feature (61)..(61): /note="Nucleotide may be methylated to form 5-methylcytosine"
ttttggactcagattgagccactactggcttatttcttccccagcttgcagacggcttgacgtgggacttcttcgccttgttattgtgtgagccagttctccctaataagctccctttcata

SEQ ID NO: 25022 - DNA, 122 bp, Homo sapiens
  misc_feature (61)..(62): /note="This region represents a CpG dinucleotide"
  misc_feature (61)..(61): /note="Nucleotide may be methylated to form 5-methylcytosine"
catatacccaactttctattatttatctcttcttcgaaatctcagagcctttaaactcaacgcagccgaagctaagcctatgagctcaccccagaacctagtcctcttcctgtgtttcctgt

SEQ ID NO: 25023 - DNA, 122 bp, Homo sapiens
  misc_feature (61)..(62): /note="This region represents a CpG dinucleotide"
  misc_feature (61)..(61): /note="Nucleotide may be methylated to form 5-methylcytosine"
tgctgatctcaaaataccaacttttggtttcacagattgtcttttttctgtttaccatgccgttgcttttcgctgtcatctttatcattttccttccttctacttgggtttgatttcctttt

SEQ ID NO: 25024 - DNA, 122 bp, Homo sapiens
  misc_feature (61)..(62): /note="This region represents a CpG dinucleotide"
  misc_feature (61)..(61): /note="Nucleotide may be methylated to form 5-methylcytosine"
tttacctgcttcatgatttggcccaaggctcgttaagacttttagcatattttttaatctcgtgtttaagggacttaagccaccatcaaatagagcaatttcatcaagccatccactataca

SEQ ID NO: 25025 - DNA, 122 bp, Homo sapiens
  misc_feature (61)..(62): /note="This region represents a CpG dinucleotide"
  misc_feature (61)..(61): /note="Nucleotide may be methylated to form 5-methylcytosine"
acacagcaaaagcaggagcaagagagagcaagggaggaggtgccacacacttttaaacgacgagatctcatgagaactcactacagtgaagacagtaccaagaggcatggtgctataccatt

SEQ ID NO: 25026 - DNA, 122 bp, Homo sapiens
  misc_feature (61)..(62): /note="This region represents a CpG dinucleotide"
  misc_feature (61)..(61): /note="Nucleotide may be methylated to form 5-methylcytosine"
catgccaggcagaatggttaacacaaaataaatgtcaatgcaagagagcgttctgggaaacgttttcacctggagtagaatatgcttaattaatgacctcgaaatgaaaaggtctgataagc

SEQ ID NO: 25027 - DNA, 122 bp, Homo sapiens
  misc_feature (61)..(62): /note="This region represents a CpG dinucleotide"
  misc_feature (61)..(61): /note="Nucleotide may be methylated to form 5-methylcytosine"
agccagaaaaggtgtgtggtttcgcagtctttcagacaaactgaatttaatagtagctgacgtgaacccctgtttctcctctaggctccagagccgcaccccagtgcaggtgtggaagctca

SEQ ID NO: 25028 - DNA, 122 bp, Homo sapiens
  misc_feature (61)..(62): /note="This region represents a CpG dinucleotide"
  misc_feature (61)..(61): /note="Nucleotide may be methylated to form 5-methylcytosine"
aggtttacagagtacaaaagacaagactcttctttctttctgacttcccctttcctcatgcgagggtctttagtcataaatgagaaataggaacccgggctagagtgaaaccaaatggataa

SEQ ID NO: 25029 - DNA, 122 bp, Homo sapiens
  misc_feature (61)..(62): /note="This region represents a CpG dinucleotide"
  misc_feature (61)..(61): /note="Nucleotide may be methylated to form 5-methylcytosine"
gaataggtccaaaagtggcccagtctaagtaaaacagggagggaagactggattgacactcgcacactcatctgtctatgacaaagaacaaagaacctagaattttggcattgatgagtaat

SEQ ID NO: 25030 - DNA, 122 bp, Homo sapiens
  misc_feature (61)..(62): /note="This region represents a CpG dinucleotide"
  misc_feature (61)..(61): /note="Nucleotide may be methylated to form 5-methylcytosine"
gtgcatttttgcattcagcaagaacttcaagtacttctgctgcagacattctaaggatcacgctttaggaaacacagcagtttgacttcctcttttggtctctatctttgtatttattgtct

SEQ ID NO: 25031 - DNA, 122 bp, Homo sapiens
  misc_feature (61)..(62): /note="This region represents a CpG dinucleotide"
  misc_feature (61)..(61): /note="Nucleotide may be methylated to form 5-methylcytosine"
gcaagtataaacacatgtgcacggaccatcaggggatcagggcaagctgggccaggctggcgaggttagctcagggagaaccaagccccagacgactacccgtggccaccccctgcattcat

SEQ ID NO: 25032 - DNA, 122 bp, Homo sapiens
  misc_feature (61)..(62): /note="This region represents a CpG dinucleotide"
  misc_feature (61)..(61): /note="Nucleotide may be methylated to form 5-methylcytosine"
gaaagagtccctccaggggcaatccaactaccacaggccaggggccaagctttggtgagccgagcctgggccctgcccctcccttctctatgggcctagggttgctgtgctgtgtgtggcat

SEQ ID NO: 25033 - DNA, 122 bp, Homo sapiens
  misc_feature (61)..(62): /note="This region represents a CpG dinucleotide"
  misc_feature (61)..(61): /note="Nucleotide may be methylated to form 5-methylcytosine"
gcatgtccgcaggtgtacacgtgagtgattcagcctggggttcacaatgagcgtggcacccgtagtgcaatgaaaaggacatttttatgcagatacgtgattcattttcaccttgctgatct

SEQ ID NO: 25034 - DNA, 122 bp, Homo sapiens
  misc_feature (61)..(62): /note="This region represents a CpG dinucleotide"
  misc_feature (61)..(61): /note="Nucleotide may be methylated to form 5-methylcytosine"
caggatccacctgccttggcctcccaaagtgctaggattataggcttgaggcactgtgcccggcctatatattgtattttaaagttatgcattctgtgggagtcagctgaatttttgtgttg

SEQ ID NO: 25035 - DNA, 122 bp, Homo sapiens
  misc_feature (61)..(62): /note="This region represents a CpG dinucleotide"
  misc_feature (61)..(61): /note="Nucleotide may be methylated to form 5-methylcytosine"
ctcaagtgatttgcctgccttggcctcccaaaatgctgggattacaggcatgagccactacgcctggcctgaacagatttcatatcgtgtatttgcatgtccagaaagtgatcccatagcct

SEQ ID NO: 25036 - DNA, 122 bp, Homo sapiens
  misc_feature (61)..(62): /note="This region represents a CpG dinucleotide"
  misc_feature (61)..(61): /note="Nucleotide may be methylated to form 5-methylcytosine"
catcatctcactatgtaaaaaccaagaccgcaaaagacagaaaacccaagcaacaagggccgaatattctggctcacgtgatcaaaccacagatcatacaggaaatgctgcagcttcccctg

SEQ ID NO: 25037 - DNA, 122 bp, Homo sapiens
  misc_feature (61)..(62): /note="This region represents a CpG dinucleotide"
  misc_feature (61)..(61): /note="Nucleotide may be methylated to form 5-methylcytosine"
aggctgttggtgccgcggcagcatgctgtccttgagagcactgtggaatttgcagtgtgccgtacagattcagaaatggtgtatgtttcttgtggcattagtgttttgacttgcaaatctgg

SEQ ID NO: 25038 - DNA, 122 bp, Homo sapiens
  misc_feature (61)..(62): /note="This region represents a CpG dinucleotide"
  misc_feature (61)..(61): /note="Nucleotide may be methylated to form 5-methylcytosine"
gctattaacaattcacaagcctacagctggaacttatgtgacagagcccaagggattttacggcacaggaatgagatgaatcactgtgaacacaggacaactgagacatgtgaaatcaaact

SEQ ID NO: 25039 - DNA, 122 bp, Homo sapiens
  misc_feature (61)..(62): /note="This region represents a CpG dinucleotide"
  misc_feature (61)..(61): /note="Nucleotide may be methylated to form 5-methylcytosine"
acccaatgagtcctgagaaagggctttttcatcccagataaagtagcaggaagaaagtaacgggcaggaagcaattccaagaactccacagtggatacaatggcatccattttattatttta

SEQ ID NO: 25040 - DNA, 122 bp, Homo sapiens
  misc_feature (61)..(62): /note="This region represents a CpG dinucleotide"
  misc_feature (61)..(61): /note="Nucleotide may be methylated to form 5-methylcytosine"
atggcaaaaagggactctgcagtctcaacttgtgacgaagttaagaagcatgagatggggcgataatcctggatggttcaggcgggaccaatgtcctcactgggctgctaataaaggaaagc

SEQ ID NO: 25041 - DNA, 122 bp, Homo sapiens
  misc_feature (61)..(62): /note="This region represents a CpG dinucleotide"
  misc_feature (61)..(61): /note="Nucleotide may be methylated to form 5-methylcytosine"
tccactttgatagtggcgagaagagtagcctcttgcttttgcatgttttcctaatcacagcgtgctttcttgtctgctatttcatttgacttttttcaaccagccgctgaggtggggattat

SEQ ID NO: 25042 - DNA, 122 bp, Homo sapiens
  misc_feature (61)..(62): /note="This region represents a CpG dinucleotide"
  misc_feature (61)..(61): /note="Nucleotide may be methylated to form 5-methylcytosine"
tatacatacatatcattgtgtagattgcactttttcagaaaagacaactgatcaccagcacgtcactctcacttcctcccatgtacattttgtatcttccccacagggaagtgaaactggtg

SEQ ID NO: 25043 - DNA, 122 bp, Homo sapiens
  misc_feature (61)..(62): /note="This region represents a CpG dinucleotide"
  misc_feature (61)..(61): /note="Nucleotide may be methylated to form 5-methylcytosine"
ccctgaggggaggtgcttctgttttctgctttccctgtaagctgctgtgctgagcagcaacgtcagaactaatgcatgtggtcatcagtggatgagcaggattacataaggcctttactgtg

SEQ ID NO: 25044 - DNA, 122 bp, Homo sapiens
  misc_feature (61)..(62): /note="This region represents a CpG dinucleotide"
  misc_feature (61)..(61): /note="Nucleotide may be methylated to form 5-methylcytosine"
atgcaaatttataaaggactatggcaattcactggcatagaaaagatgttccctcagtatcgtaagttatgcaaagagaagaaggcaagcacttttaaaaaacctgttagtaagtttatttt

SEQ ID NO: 25045 - DNA, 122 bp, Homo sapiens
  misc_feature (61)..(62): /note="This region represents a CpG dinucleotide"
  misc_feature (61)..(61): /note="Nucleotide may be methylated to form 5-methylcytosine"
tcagcatcagtgaggcccctccaactctcctactggacaagttctggtttccctcatggacgagggttgaacaaaaatgaaagataagtcagttgttatgactagaaaaagtgattaccagg

SEQ ID NO: 25046 - DNA, 122 bp, Homo sapiens
  misc_feature (61)..(62): /note="This region represents a CpG dinucleotide"
  misc_feature (61)..(61): /note="Nucleotide may be methylated to form 5-methylcytosine"
agctggctcttgagagaacctgtcatcaacatccctgtccccgtgggtgtcaggaaggttcggccttctttaaggtaggcactgtgtcctcatggactgttcattttgggaagaaccttggg

SEQ ID NO: 25047 - DNA, 122 bp, Homo sapiens
  misc_feature (61)..(62): /note="This region represents a CpG dinucleotide"
  misc_feature (61)..(61): /note="Nucleotide may be methylated to form 5-methylcytosine"
acctgtgaacacagagcgctctgcttcctgtacctctgagcacccaggaagtcccttaggcggtgagattcctgagcccaaagtaggaggggccctcctaacacagcatctccccaggtctc

SEQ ID NO: 25048 - DNA, 122 bp, Homo sapiens
  misc_feature (61)..(62): /note="This region represents a CpG dinucleotide"
  misc_feature (61)..(61): /note="Nucleotide may be methylated to form 5-methylcytosine"
ttctgctcccagatgttcctgcagcagccagctgtatccctgagcttcagcagcacccagcgacctgaggctcagcagcagctacagcaaaggtcagctgcagtgactcagccccagctcgg

SEQ ID NO: 25049 - DNA, 122 bp, Homo sapiens
  misc_feature (61)..(62): /note="This region represents a CpG dinucleotide"
  misc_feature (61)..(61): /note="Nucleotide may be methylated to form 5-methylcytosine"
atgacctgcagggctgtggcttgtgggctttgagaacgttctgtagtcttcccttgaaagcgtgtgtggtgatgacagtcacattcacacgcactcatgctaccgcagatctctgcatttcc

SEQ ID NO: 25050 - DNA, 122 bp, Homo sapiens
  misc_feature (61)..(62): /note="This region represents a CpG dinucleotide"
  misc_feature (61)..(61): /note="Nucleotide may be methylated to form 5-methylcytosine"
ggaaaccaaggcatgaggtggtaaatatggctccagattctacacccttaactgctgcaccgcacaattccccaggctgaggacgggtcaggtcaagaagagacttgcaggctgggtgcggt

SEQ ID NO: 25051 - DNA, 122 bp, Homo sapiens
  misc_feature (61)..(62): /note="This region represents a CpG dinucleotide"
  misc_feature (61)..(61): /note="Nucleotide may be methylated to form 5-methylcytosine"
caaaaggtatgagtagcaaacagcactgagatctcttccttcctgtgtgaacctccccaccggaagctgcctcatgctgtgatgcttaaaagtcataaaacggtatcattattcaaggcata

SEQ ID NO: 25052 - DNA, 122 bp, Homo sapiens
  misc_feature (61)..(62): /note="This region represents a CpG dinucleotide"
  misc_feature (61)..(61): /note="Nucleotide may be methylated to form 5-methylcytosine"
ctcagaccaaggacccgtgaactttccaatacatttgaccccagtgaaccctgtgtttctcgtgactggccctgtactaaagacctcagtgttcttggtctccatttaggcaaggtcagacc

SEQ ID NO: 25053 - DNA, 122 bp, Homo sapiens
  misc_feature (61)..(62): /note="This region represents a CpG dinucleotide"
  misc_feature (61)..(61): /note="Nucleotide may be methylated to form 5-methylcytosine"
cccctccccctgatgacccccataggagtggagggagaagccaggaaggaaagggggctgcgttagtttgcaacttgagtctcctgccacagaccagtgaggaagtggggggagaagtggct

SEQ ID NO: 25054 - DNA, 122 bp, Homo sapiens
  misc_feature (61)..(62): /note="This region represents a CpG dinucleotide"
  misc_feature (61)..(61): /note="Nucleotide may be methylated to form 5-methylcytosine"
gagattggagacaggggtatactttggcctccatagagagcccacactgtcccccacacacgcagcactgactgcccctgggcctctctcagcgaagtgcatctggcctatatacaagatat

SEQ ID NO: 25055 - DNA, 122 bp, Homo sapiens
  misc_feature (61)..(62): /note="This region represents a CpG dinucleotide"
  misc_feature (61)..(61): /note="Nucleotide may be methylated to form 5-methylcytosine"
ttctttagcagttgtgctatgtctaggctagtggttcccaatgtgggtccttggacctgccgcatcagcctcacctgggaatttgtcacaaatgtacatgctaaggtcttatcccaaagctg

SEQ ID NO: 25056 - DNA, 122 bp, Homo sapiens
  misc_feature (61)..(62): /note="This region represents a CpG dinucleotide"
  misc_feature (61)..(61): /note="Nucleotide may be methylated to form 5-methylcytosine"
cttaacaagattaaatgagaatccacccagggtattttgtgcagctctcagcagttgatacgtgttgatacaatgctatgtattgtcagggttgtgataagttgattaatattattaatata

SEQ ID NO: 25057 - DNA, 122 bp, Homo sapiens
  misc_feature (61)..(62): /note="This region represents a CpG dinucleotide"
  misc_feature (61)..(61): /note="Nucleotide may be methylated to form 5-methylcytosine"
aacatgaccagttttcgaacttggcgtgctctgaattattaaaaataatcttatagtgtccgcccagccctctcaagcatacctgcctttaatcttgtaaacaagttcatagcaggaagggg

SEQ ID NO: 25058 - DNA, 122 bp, Homo sapiens
  misc_feature (61)..(62): /note="This region represents a CpG dinucleotide"
  misc_feature (61)..(61): /note="Nucleotide may be methylated to form 5-methylcytosine"
tcaagggccttgggcaggccaggcatgtgcagcgatgcatacatgtaggacacagagctacgagcccaggttccaatccaaggtgcacagtctcaggagctccccaggagctagcatctctc

SEQ ID NO: 25059 - DNA, 122 bp, Homo sapiens
  misc_feature (61)..(62): /note="This region represents a CpG dinucleotide"
  misc_feature (61)..(61): /note="Nucleotide may be methylated to form 5-methylcytosine"
aggggaagagaagaatggaaagttgcaccagctcttaacagcctcaactcagagatgacacgtgtctcttctgctcccaatccctcagccagaattagtaatgtgggctgctgaaaaatgtc

SEQ ID NO: 25060 - DNA, 122 bp, Homo sapiens
  misc_feature (61)..(62): /note="This region represents a CpG dinucleotide"
  misc_feature (61)..(61): /note="Nucleotide may be methylated to form 5-methylcytosine"
atttgtcatgcttagctcttatgagatgacccggtcctttaaaaaaaaaaaaagtatctccgtttattctgtttatttggaggtttgaagtgaattcggcagcattcattaaactccttcca

SEQ ID NO: 25061 - DNA, 122 bp, Homo sapiens
  misc_feature (61)..(62): /note="This region represents a CpG dinucleotide"
  misc_feature (61)..(61): /note="Nucleotide may be methylated to form 5-methylcytosine"
tcatgagggctgaccacaagggaccgcaccataaggattttctgccagtcctctacgatacgctggcagccctggaacattcagaagtgaagattagatatgtcttctgatacattgttttt

SEQ ID NO: 25062 - DNA, 122 bp, Homo sapiens
  misc_feature (61)..(62): /note="This region represents a CpG dinucleotide"
  misc_feature (61)..(61): /note="Nucleotide may be methylated to form 5-methylcytosine"
gacatcttctatcaagctcctaatcaggccctcaatcaagttccatgttctctttggcggcgtattggaagcgtgaagtttaggcccacactttgctatccacaagctgacagagaggcaac

SEQ ID NO: 25063 - DNA, 122 bp, Homo sapiens
  misc_feature (61)..(62): /note="This region represents a CpG dinucleotide"
  misc_feature (61)..(61): /note="Nucleotide may be methylated to form 5-methylcytosine"
gtgtttatgagtcattagggaatcattttaagcttatcccatttctcttaagtacacagacggttttagaatctgtacttttaatgattggtgctgcttagacggtcaaggcaaatttgagt

SEQ ID NO: 25064 - DNA, 122 bp, Homo sapiens
  misc_feature (61)..(62): /note="This region represents a CpG dinucleotide"
  misc_feature (61)..(61): /note="Nucleotide may be methylated to form 5-methylcytosine"
cctgaatccctccttggaggattagtgcccacaaattgtaaacagccacccagatctcagcgagcaagaaataaattatacctgaatgttttaaagggttttttggtggggaaagaacagtg

SEQ ID NO: 25065 - DNA, 122 bp, Homo sapiens
  misc_feature (61)..(62): /note="This region represents a CpG dinucleotide"
  misc_feature (61)..(61): /note="Nucleotide may be methylated to form 5-methylcytosine"
aatagatatgaatttgtttccttagatcttacctttagactcttgccattctcatgagtacgttcaattagtttgcatttccctgactactagtgagatggagcagtagcgctttctgttga

SEQ ID NO: 25066 - DNA, 122 bp, Homo sapiens
  misc_feature (61)..(62): /note="This region represents a CpG dinucleotide"
  misc_feature (61)..(61): /note="Nucleotide may be methylated to form 5-methylcytosine"
aggtgtcatagtggataagaacttaggctgtgattcagacagagatcatcatttactagccgggtgacctcagacaattcagctaaccactctgtgaaatagggataataatgtgtaactca

SEQ ID NO: 25067 - DNA, 122 bp, Homo sapiens
  misc_feature (61)..(62): /note="This region represents a CpG dinucleotide"
  misc_feature (61)..(61): /note="Nucleotide may be methylated to form 5-methylcytosine"
ccctaggtctgagccccactcccaaccccccacccacccttcagatggacctgattcatacgaatgtgtgaatgactaacagccctcaaaatgcagtttaggtattcccgttttgaaaaagg

SEQ ID NO: 25068 - DNA, 122 bp, Homo sapiens
  misc_feature (61)..(62): /note="This region represents a CpG dinucleotide"
  misc_feature (61)..(61): /note="Nucleotide may be methylated to form 5-methylcytosine"
ccacctccgcccaagaggcagttctggaaatgtgagcatgttaggggtgccactgatgggcggccactactgagatttaacctgttggagcatgcgtgatacacaagccctgcagcttacag

SEQ ID NO: 25069 - DNA, 122 bp, Homo sapiens
  misc_feature (61)..(62): /note="This region represents a CpG dinucleotide"
  misc_feature (61)..(61): /note="Nucleotide may be methylated to form 5-methylcytosine"
gcagccctgactccagctaatgcgatttctggtcttctttccacaggtgtgtagctgggacggtgctggtctgagctggaccttgtctgatggcttcctccaaccctcctccacagcctgcc

SEQ ID NO: 25070 - DNA, 122 bp, Homo sapiens
  misc_feature (61)..(62): /note="This region represents a CpG dinucleotide"
  misc_feature (61)..(61): /note="Nucleotide may be methylated to form 5-methylcytosine"
ttttccttacacaattgtttttttctgtcttagactttgtaaattctccaagtgatttgacgttccctctttagctggctcctaggaagctcagaagcaaatctgtgactcatccctagtaa

SEQ ID NO: 25071 - DNA, 122 bp, Homo sapiens
  misc_feature (61)..(62): /note="This region represents a CpG dinucleotide"
  misc_feature (61)..(61): /note="Nucleotide may be methylated to form 5-methylcytosine"
ggagttcacaggcaatgagcctgttacctgtctatgagtattcagtttaaccatttcgaccgctacctccttcacaaattcttctgttaattccacaactggaattcatttttatctccttc

SEQ ID NO: 25072 - DNA, 122 bp, Homo sapiens
  misc_feature (61)..(62): /note="This region represents a CpG dinucleotide"
  misc_feature (61)..(61): /note="Nucleotide may be methylated to form 5-methylcytosine"
atcctgctccatgtcaggaaaatatttataggtccccagtcatgggatctggaaacagagcggaggaaggagctcgggaatggtcttgctcaatccttcccggcctctgctcatcggaatca

SEQ ID NO: 25073 - DNA, 122 bp, Homo sapiens
  misc_feature (61)..(62): /note="This region represents a CpG dinucleotide"
  misc_feature (61)..(61): /note="Nucleotide may be methylated to form 5-methylcytosine"
acccaggctttagtgacaacactgccaccaaacaggtttcagtttgctaggaaagccttacgtaagttattttctgtaggtgagaggtgctgccttgggttccagaatcttcgccagttagt

SEQ ID NO: 25074 - DNA, 122 bp, Homo sapiens
  misc_feature (61)..(62): /note="This region represents a CpG dinucleotide"
  misc_feature (61)..(61): /note="Nucleotide may be methylated to form 5-methylcytosine"
agagaggccattctggtagctaaaaatactgtgtagacaggcagactgaggggcaccctacgcctgttttgaagattaagaattgttacatgctttggaaattctcagctagaagtacatga

SEQ ID NO: 25075 - DNA, 122 bp, Homo sapiens
  misc_feature (61)..(62): /note="This region represents a CpG dinucleotide"
  misc_feature (61)..(61): /note="Nucleotide may be methylated to form 5-methylcytosine"
tcagagcctctgtttcctcatcagtcagtgcctgtgaggataaaaggagacacgtatggacgtgcctggtacatttcatgacctattagaagattgtgaggccaggaagtatgtacctgcag

SEQ ID NO: 25076 - DNA, 122 bp, Homo sapiens
  misc_feature (61)..(62): /note="This region represents a CpG dinucleotide"
  misc_feature (61)..(61): /note="Nucleotide may be methylated to form 5-methylcytosine"
gagagtcagtcccccatttgtccaatgcagtgctgtcgcccaagtgtgaagagggatgtgcgggtctgagaacaaagttagcctgcttagtactttgtccaaggtcagccctggctccaagc

SEQ ID NO: 25077 - DNA, 122 bp, Homo sapiens
  misc_feature (61)..(62): /note="This region represents a CpG dinucleotide"
  misc_feature (61)..(61): /note="Nucleotide may be methylated to form 5-methylcytosine"
acacaaagcactttagctccctttgctctcatttcctgctttataaaaggaagtgaagcccggcctgcttaactgcagaaatattgtgagttaactaaggatttccatttcttctgccatct

SEQ ID NO: 25078 - DNA, 122 bp, Homo sapiens
  misc_feature (61)..(62): /note="This region represents a CpG dinucleotide"
  misc_feature (61)..(61): /note="Nucleotide may be methylated to form 5-methylcytosine"
tagagtccctatccctttatgaagtctttatgaacagactcgatgtgtttccagggctgacgtgaggcatagtttctgccctggtcatcacaggagagtgattccaataaaataagaataaa

SEQ ID NO: 25079 - DNA, 122 bp, Homo sapiens
  misc_feature (61)..(62): /note="This region represents a CpG dinucleotide"
  misc_feature (61)..(61): /note="Nucleotide may be methylated to form 5-methylcytosine"
tcctgaatagttatacctctggctagaccagagtgaatatggtgtgatggtgaagagaaccgctatgtgttggctctgtcagctgagtgagtcactcccactaatcctcagtgttctcacct

SEQ ID NO: 25080 - DNA, 122 bp, Homo sapiens
  misc_feature (61)..(62): /note="This region represents a CpG dinucleotide"
  misc_feature (61)..(61): /note="Nucleotide may be methylated to form 5-methylcytosine"
cctgcaaagcagaatgtctcatggggtgtgccgtctgttccccacagctacctccaagcacgaagcctttccaggaagcccagagtgaactgaaccaggcagcagctgatctgaaccagtct

SEQ ID NO: 25081 - DNA, 122 bp, Homo sapiens
  misc_feature (61)..(62): /note="This region represents a CpG dinucleotide"
  misc_feature (61)..(61): /note="Nucleotide may be methylated to form 5-methylcytosine"
tctggctctctctcatctaaaagaacccaggaaagagaagcctgcagaagcgagtgctgtcgaatctcacgtgtgatctccacagagcacagcacagccagccgcctgctcacgtaatgtac

SEQ ID NO: 25082 - DNA, 122 bp, Homo sapiens
  misc_feature (61)..(62): /note="This region represents a CpG dinucleotide"
  misc_feature (61)..(61): /note="Nucleotide may be methylated to form 5-methylcytosine"
gggggccggtagctaagggagttactggatgcaactcgttctctgctgtgactgaattcccgcgcgttgtcactttggggaagtaaggtaagggtggcttcggtatttcaggctttagacat

SEQ ID NO: 25083 - DNA, 122 bp, Homo sapiens
  misc_feature (61)..(62): /note="This region represents a CpG dinucleotide"
  misc_feature (61)..(61): /note="Nucleotide may be methylated to form 5-methylcytosine"
agactgaaatcccagctgtgcactgccctggtggtctcctgtcccaaccgggcgttgatccgggccttgcaggctcacgtgctctgcagaaaatagagaaaccaataaatgctcccctgggt

SEQ ID NO: 25084 - DNA, 122 bp, Homo sapiens
  misc_feature (61)..(62): /note="This region represents a CpG dinucleotide"
  misc_feature (61)..(61): /note="Nucleotide may be methylated to form 5-methylcytosine"
catacctatgactcaactcagaagtcacctcctgcaagaagatgggttggacactgcacccgcttccctccacccccaccacagtgacctgtttgcttggtgtagtggagctggactggcca

SEQ ID NO: 25085 - DNA, 122 bp, Homo sapiens
  misc_feature (61)..(62): /note="This region represents a CpG dinucleotide"
  misc_feature (61)..(61): /note="Nucleotide may be methylated to form 5-methylcytosine"
caatgggtcaggattcaagtaaaggagacttgaattcaattactaaacaaaagatatgaccggaaaccaagaacaaacttcctgatttagaaatgctgtgcttgtagggtaactacagtcaa

SEQ ID NO: 25086 - DNA, 122 bp, Homo sapiens
  misc_feature (61)..(62): /note="This region represents a CpG dinucleotide"
  misc_feature (61)..(61): /note="Nucleotide may be methylated to form 5-methylcytosine"
agggcaaatagctgatgtcagcggtcttttctaggcaagaaatgaacgtgatattttctccgcctcctctcttctgactgagaagatgattcctggagataatccacttggttatccgtgga

SEQ ID NO: 25087 - DNA, 122 bp, Homo sapiens
  misc_feature (61)..(62): /note="This region represents a CpG dinucleotide"
  misc_feature (61)..(61): /note="Nucleotide may be methylated to form 5-methylcytosine"
tgaacacagatattcatcgcgattctgtctgcaatagcaagactggagaggtgagtccttcggagactgggattatggaatcttcctaccacggaacccatgaaacggctaaaaatagcgag

SEQ ID NO: 25088 - DNA, 122 bp, Homo sapiens
  misc_feature (61)..(62): /note="This region represents a CpG dinucleotide"
  misc_feature (61)..(61): /note="Nucleotide may be methylated to form 5-methylcytosine"
tccgtccctcctagacagaggtggattgccgcgacatttcagggaggagaaatggaggggcgaggagggcaaagacgccctactaatctcccatcttcagaacgcgtcccaccacgcccgcg

SEQ ID NO: 25089 - DNA, 122 bp, Homo sapiens
  misc_feature (61)..(62): /note="This region represents a CpG dinucleotide"
  misc_feature (61)..(61): /note="Nucleotide may be methylated to form 5-methylcytosine"
taaataacttgcctaggctcatactcctgctaaatcttacagccaggattaaaaccaaggcggtctgacttcagagcctgtgccctgaaccacaaaaccatgctgcctctctgagtatgaag

SEQ ID NO: 25090 - DNA, 122 bp, Homo sapiens
  misc_feature (61)..(62): /note="This region represents a CpG dinucleotide"
  misc_feature (61)..(61): /note="Nucleotide may be methylated to form 5-methylcytosine"
aaatcaccaggtcagaactcacctttacttgacctgtccacaacatttgacaaagcttaccgatgactccttgaaacttgactttatttggtttatagagtaccacaccttttggttttctc

SEQ ID NO: 25091 - DNA, 122 bp, Homo sapiens
  misc_feature (61)..(62): /note="This region represents a CpG dinucleotide"
  misc_feature (61)..(61): /note="Nucleotide may be methylated to form 5-methylcytosine"
gaggactcaattcctcaatgagtgaaatcatccatttgctgactcaaacagttactgagtcgtctgtcaacttcctgacctttgtaagtctcctggcccctctcttgtcctttcccctggaa

SEQ ID NO: 25092 - DNA, 122 bp, Homo sapiens
  misc_feature (61)..(62): /note="This region represents a CpG dinucleotide"
  misc_feature (61)..(61): /note="Nucleotide may be methylated to form 5-methylcytosine"
ctacctgaggaggtggcccttggactggctagtgtttgttgtctggcctctttattgcctcgtgatatggttacactctgtgtccccacccagatctcatcttgaattgtaatccccataat

SEQ ID NO: 25093 - DNA, 122 bp, Homo sapiens
  misc_feature (61)..(62): /note="This region represents a CpG dinucleotide"
  misc_feature (61)..(61): /note="Nucleotide may be methylated to form 5-methylcytosine"
aacaatcatctgataatactcatagatcctgtgagtcattcagacagtgcatggcaaggacggctaacttctgctccacatgtctggggctttttagctgtaaagattcaacagcttggtgc

SEQ ID NO: 25094 - DNA, 122 bp, Homo sapiens
  misc_feature (61)..(62): /note="This region represents a CpG dinucleotide"
  misc_feature (61)..(61): /note="Nucleotide may be methylated to form 5-methylcytosine"
gtcatagaaccttagtaagcccacgttgtacagaagacattgtagataatccttcaattacgagcaggtagtatccaggtaactacatacatcttctaaggtggtcttcccagcagtcctta

SEQ ID NO: 25095 - DNA, 122 bp, Homo sapiens
  misc_feature (61)..(62): /note="This region represents a CpG dinucleotide"
  misc_feature (61)..(61): /note="Nucleotide may be methylated to form 5-methylcytosine"
ttgctggtatattcgaaatatgttcaccagatctacctatagctccacctgaaaaaattccgcaccgcttcccaatttatgaagggattgcacaataatttaacacaaattctgtcaagcat

SEQ ID NO: 25096 - DNA, 122 bp, Homo sapiens
  misc_feature (61)..(62): /note="This region represents a CpG dinucleotide"
  misc_feature (61)..(61): /note="Nucleotide may be methylated to form 5-methylcytosine"
tttatcagatttatacatttaaaatattgtgaatataggatccaacattgctaagattatcgtgaaatgggtaatcatatacactgaaaaaaggagtttaaaattgtatcataattccaatg

SEQ ID NO: 25097 - DNA, 122 bp, Homo sapiens
  misc_feature (61)..(62): /note="This region represents a CpG dinucleotide"
  misc_feature (61)..(61): /note="Nucleotide may be methylated to form 5-methylcytosine"
ggtcccgccggtggctgccctctgcctcccccgcacactccgcgcattgtttgggactgtcgggaagacgcctcgcacctcacaaatcatttaagcacctcagtctgacgcctgcagtcatt

SEQ ID NO: 25098 - DNA, 122 bp, Homo sapiens
  misc_feature (61)..(62): /note="This region represents a CpG dinucleotide"
  misc_feature (61)..(61): /note="Nucleotide may be methylated to form 5-methylcytosine"
gaaaagcgctcatttgtcaggcttctgtggaacttgattttctgtgcctgattgtcactacgtcactctgctctgagtcagtcatcaggagtcccctgactgcccagtgcccagtgatgggc

SEQ ID NO: 25099 - DNA, 122 bp, Homo sapiens
  misc_feature (61)..(62): /note="This region represents a CpG dinucleotide"
  misc_feature (61)..(61): /note="Nucleotide may be methylated to form 5-methylcytosine"
tcttaacttggatgctgctgctcagaacagcaccttgccatggataacagttcttgattacgtttccacgaataaatcaggtgtgcttccagactcaccccttgaaggttcaatcttgtcta

SEQ ID NO: 25100 - DNA, 122 bp, Homo sapiens
  misc_feature (61)..(62): /note="This region represents a CpG dinucleotide"
  misc_feature (61)..(61): /note="Nucleotide may be methylated to form 5-methylcytosine"
cacttggaagaaaggagggcagcagggagcttctgtcatgaaggctgtggtggtggcggtcgtagccatgacaaatgaccaaaggaaaacagaaaaccgcaggctttctggtctgcagagcc

SEQ ID NO: 25101 - DNA, 122 bp, Homo sapiens
  misc_feature (61)..(62): /note="This region represents a CpG dinucleotide"
  misc_feature (61)..(61): /note="Nucleotide may be methylated to form 5-methylcytosine"
aacttcctgttttgctcattttttgactaaagtttgtgtgcccaacctctgtagtgatcacgtttctatataataaattcagggcaaagaggcaaagctaagtagaaggaattaagcaaaga

SEQ ID NO: 25102 - DNA, 122 bp, Homo sapiens
  misc_feature (61)..(62): /note="This region represents a CpG dinucleotide"
  misc_feature (61)..(61): /note="Nucleotide may be methylated to form 5-methylcytosine"
gaaagtgtaaaaatggccttgctgaggaaattaaatttatgttcaagtactatttctttacggcaccggggaacaagcatttcaaacacgtacttgctgcagactctgccctctggaatggc

SEQ ID NO: 25103 - DNA, 122 bp, Homo sapiens
  misc_feature (61)..(62): /note="This region represents a CpG dinucleotide"
  misc_feature (61)..(61): /note="Nucleotide may be methylated to form 5-methylcytosine"
gaagcaaacaggaaaggactgggcagtggtgaggccttgcgccttgcaattccccaaccccgctgacacatcttttgcccatcatgatgagcttccttcctgtcatccactcgagggcccaa

SEQ ID NO: 25104 - DNA, 122 bp, Homo sapiens
  misc_feature (61)..(62): /note="This region represents a CpG dinucleotide"
  misc_feature (61)..(61): /note="Nucleotide may be methylated to form 5-methylcytosine"
gtaggggctgtacggtgcaggttcctcccctggttcctcataggcagagtactatagggtcgcagtcttcctggacgttccctattggttgttgggcaggggctgtaggtattttctttagg

SEQ ID NO: 25105 - DNA, 122 bp, Homo sapiens
  misc_feature (61)..(62): /note="This region represents a CpG dinucleotide"
  misc_feature (61)..(61): /note="Nucleotide may be methylated to form 5-methylcytosine"
cctagaagccaaaccaaactgacaataatgcttgaaaaattaggaatggattatgatgggcggcctcactgtggtcttgatgactctaagaatatcgcccgaatagcagttcgaatgcttca

SEQ ID NO: 25106 - DNA, 122 bp, Homo sapiens
  misc_feature (61)..(62): /note="This region represents a CpG dinucleotide"
  misc_feature (61)..(61): /note="Nucleotide may be methylated to form 5-methylcytosine"
ggtggccgtcacccctggcgtggtagatattaggacagtggggatgtcaccttagcatcacgagtgaaacatatcttaactgatttttctgggagcatcgtgaggataactaatgagatgaa

SEQ ID NO: 25107 - DNA, 122 bp, Homo sapiens
  misc_feature (61)..(62): /note="This region represents a CpG dinucleotide"
  misc_feature (61)..(61): /note="Nucleotide may be methylated to form 5-methylcytosine"
gggacctgcctgttagctaggcatgccacattaactgcagctcacatgtagtgccaggggcgaccaggctgttgcttaacaaggatgcataatagctaattgcattttaggccattggtttg

SEQ ID NO: 25108 - DNA, 122 bp, Homo sapiens
  misc_feature (61)..(62): /note="This region represents a CpG dinucleotide"
  misc_feature (61)..(61): /note="Nucleotide may be methylated to form 5-methylcytosine"
acaagggtgtttagaaacgcggatctccagggctcatgtgcccatttcagagtgcagacacgcagctcacccacagggaagacagagaaagctctgaccccaagagaaaccgacatcataca

SEQ ID NO: 25109 - DNA, 122 bp, Homo sapiens
  misc_feature (61)..(62): /note="This region represents a CpG dinucleotide"
  misc_feature (61)..(61): /note="Nucleotide may be methylated to form 5-methylcytosine"
atcagggggctgatgcagtggcttcagtgtcagtgactaaccagtggccctggagtgactcgtaaggcaggtaccctgtggacagttatttgtctgggggaggttagtgccacccactccag

SEQ ID NO: 25110 - DNA, 122 bp, Homo sapiens
  misc_feature (61)..(62): /note="This region represents a CpG dinucleotide"
  misc_feature (61)..(61): /note="Nucleotide may be methylated to form 5-methylcytosine"
caaaagaatatgggaactactgtttcatttcccagttcttaagcagttgttctaatctgccgttctagttctgacacttgtttggctatgctttttaggtaatgttttttaggtaagactta

SEQ ID NO: 25111 - DNA, 122 bp, Homo sapiens
  misc_feature (61)..(62): /note="This region represents a CpG dinucleotide"
  misc_feature (61)..(61): /note="Nucleotide may be methylated to form 5-methylcytosine"
aagaatgaatgagtccttattcctcaccactgtcaagcagggcctgaggttcctgagatacgagatcagcctgagtttccatggaagggcaaggtgctctctggtctcctgggtgcagactc

SEQ ID NO: 25112 - DNA, 122 bp, Homo sapiens
  misc_feature (61)..(62): /note="This region represents a CpG dinucleotide"
  misc_feature (61)..(61): /note="Nucleotide may be methylated to form 5-methylcytosine"
tttgggctgctcaaaatgaatttcctggataattttcctaagccctcactgactcctactcgcatgtattgctaggagccagctttcactcctgggactggtttgggcttccagaaagcatg

SEQ ID NO: 25113 - DNA, 122 bp, Homo sapiens
  misc_feature (61)..(62): /note="This region represents a CpG dinucleotide"
  misc_feature (61)..(61): /note="Nucleotide may be methylated to form 5-methylcytosine"
gtgctatccaacttccttctgtagccacagaccagccttgtgggcagttgttaaggctagcgtttccatacttgcatttaactgactggacaagggggagaagtgagtggtaacttgttcaa

SEQ ID NO: 25114 - DNA, 122 bp, Homo sapiens
  misc_feature (61)..(62): /note="This region represents a CpG dinucleotide"
  misc_feature (61)..(61): /note="Nucleotide may be methylated to form 5-methylcytosine"
ttctccagttttcccaattgcagtgtattattaacttctgggacctgactgatatctacccgcttagaaaagctatggaaagcaggccgggcgcggtggctcacgcctgtaatcccagcact

SEQ ID NO: 25115 - DNA, 122 bp, Homo sapiens
  misc_feature (61)..(62): /note="This region represents a CpG dinucleotide"
  misc_feature (61)..(61): /note="Nucleotide may be methylated to form 5-methylcytosine"
aaatatgtacagtgtatgtgtctagttatctaacaacttccttattacctatctatctgtcgagccagtatacagtcatggtggagagcttgggctctgaagtgggacagggtgtgaacctg

SEQ ID NO: 25116 - DNA, 122 bp, Homo sapiens
  misc_feature (61)..(62): /note="This region represents a CpG dinucleotide"
  misc_feature (61)..(61): /note="Nucleotide may be methylated to form 5-methylcytosine"
aattgagcaaggacaggttgaatgccatgtaatttaaaccaaagccggcaactcctcacacggtcattgttgaaggtttgtgtgacgtaagtactgatgcctgaatcccaacacaaagattc

SEQ ID NO: 25117 - DNA, 122 bp, Homo sapiens
  misc_feature (61)..(62): /note="This region represents a CpG dinucleotide"
  misc_feature (61)..(61): /note="Nucleotide may be methylated to form 5-methylcytosine"
tgcttcagctggttatttcctcatcctctcactcctttcctgtggttgcttcacaggccacggcacatgttcctgtggtcgctgtgtttgtgagagaggatggtttggaaagctctgccaac

SEQ ID NO: 25118 - DNA, 122 bp, Homo sapiens
  misc_feature (61)..(62): /note="This region represents a CpG dinucleotide"
  misc_feature (61)..(61): /note="Nucleotide may be methylated to form 5-methylcytosine"
tttttcaactgtatcttgggcaaagacgaatctattcagagataacaatttattatttaacgttttgacaggtctacagaagtacaagtcaattgagtccaaataaagaactgtgctatttt

SEQ ID NO: 25119 - DNA, 122 bp, Homo sapiens
  misc_feature (61)..(62): /note="This region represents a CpG dinucleotide"
  misc_feature (61)..(61): /note="Nucleotide may be methylated to form 5-methylcytosine"
ttcagggttccggcctgacacagggttccagagatgcagctgaaacatgtgctgagtcagcgtcagcatccatgtgcataacgacatttccccatctgctctgtggttgctgttgccatatg

SEQ ID NO: 25120 - DNA, 122 bp, Homo sapiens
  misc_feature (61)..(62): /note="This region represents a CpG dinucleotide"
  misc_feature (61)..(61): /note="Nucleotide may be methylated to form 5-methylcytosine"
tgcacaccatgacggttgtgcatgattcatttattagggagacagaccagatgcgtgggacggccctgctcaccatcaaggcagatctgtgggcagacagagcattgggttctgctgtgggt

SEQ ID NO: 25121 - DNA, 122 bp, Homo sapiens
  misc_feature (61)..(62): /note="This region represents a CpG dinucleotide"
  misc_feature (61)..(61): /note="Nucleotide may be methylated to form 5-methylcytosine"
tttttcagttttaaacatgaaacaccatgatctgttccttgctgagttctctgatactctcgtcacatcttgcttcatgcctgagaaaccaaatatacaaaccgacaatgaccaggccacat

SEQ ID NO: 25122 - DNA, 122 bp, Homo sapiens
  misc_feature (61)..(62): /note="This region represents a CpG dinucleotide"
  misc_feature (61)..(61): /note="Nucleotide may be methylated to form 5-methylcytosine"
tccctttcgtgctcaggcttcacacgcacagcccggcagatgcccaggagaccttggtggcgggctggtagtattactcatctgacgtccatcactgtagacaaaggttgtggagcatcgcg

SEQ ID NO: 25123 - DNA, 122 bp, Homo sapiens
  misc_feature (61)..(62): /note="This region represents a CpG dinucleotide"
  misc_feature (61)..(61): /note="Nucleotide may be methylated to form 5-methylcytosine"
cttttgaaaaatgagagaaactaagtgccagaagtcaatgactttgtttcacgctcaattcgctcccaggcaccggatctgagagcaaaccttttaaatctcccctcctgctcccaaacttg

SEQ ID NO: 25124 - DNA, 122 bp, Homo sapiens
  misc_feature (61)..(62): /note="This region represents a CpG dinucleotide"
  misc_feature (61)..(61): /note="Nucleotide may be methylated to form 5-methylcytosine"
tttaaaaggtgcatacagaactctgtaaatgcaatgatgattactgtttgtcaaatgtgtcgttgcttcctgcatgagtcctgtctccagttagctgtggcagtttctgagatgagctggcc

SEQ ID NO: 25125 - DNA, 122 bp, Homo sapiens
  misc_feature (61)..(62): /note="This region represents a CpG dinucleotide"
  misc_feature (61)..(61): /note="Nucleotide may be methylated to form 5-methylcytosine"
atgctcaaagttggattgggcttaagtatgttaatccagagaatgactgtgtattttcagcgctgagctaggacaagcagagtattaagatttgccttagcaggcactattgtgagaaggaa

SEQ ID NO: 25126 - DNA, 122 bp, Homo sapiens
  misc_feature (61)..(62): /note="This region represents a CpG dinucleotide"
  misc_feature (61)..(61): /note="Nucleotide may be methylated to form 5-methylcytosine"
gttatataagaaagccctttgttaaaggacttacttgctatggtttcccttgaccaataacgatacatacatagttgactttttaggacatgtaataaaagacagtagggtatcgcatttca

SEQ ID NO: 25127 - DNA, 122 bp, Homo sapiens
  misc_feature (61)..(62): /note="This region represents a CpG dinucleotide"
  misc_feature (61)..(61): /note="Nucleotide may be methylated to form 5-methylcytosine"
gagattagaatgtctacctcagtaactttgattcatcttaagccatcagatgtctcttgacgtttagataataatctactaccaaagtactacaggagttcaaaaacattcatcacccttca

SEQ ID NO: 25128 - DNA, 122 bp, Homo sapiens
  misc_feature (61)..(62): /note="This region represents a CpG dinucleotide"
  misc_feature (61)..(61): /note="Nucleotide may be methylated to form 5-methylcytosine"
gcattagcatgacaggaacaggaacattgctcagctcattgatctgaaaagcaaggagaacgtaaggctctcagccaggaggccacctgcctcagagacactaagctacaatgtggatgcca

SEQ ID NO: 25129 - DNA, 122 bp, Homo sapiens
  misc_feature (61)..(62): /note="This region represents a CpG dinucleotide"
  misc_feature (61)..(61): /note="Nucleotide may be methylated to form 5-methylcytosine"
actgcggggtctctggagaggcttgctgcatgctgtggccaagtcagcagtgcactggggcgggcagggctggctggccttgggtgagaggggacacctggatggcaaactgatggaggctg

SEQ ID NO: 25130 - DNA, 122 bp, Homo sapiens
  misc_feature (61)..(62): /note="This region represents a CpG dinucleotide"
  misc_feature (61)..(61): /note="Nucleotide may be methylated to form 5-methylcytosine"
cacgatccgccggccttggcctcccaaagtgctgggattacagttgtgagccactgtgcccggccataatctgtatttaaacataaggaaacatcaggccaggcgtggtggctcatgcctgt

SEQ ID NO: 25131 - DNA, 122 bp, Homo sapiens
  misc_feature (61)..(62): /note="This region represents a CpG dinucleotide"
  misc_feature (61)..(61): /note="Nucleotide may be methylated to form 5-methylcytosine"
ctggctgggcccaggggatacacccgcccagaatgggtggagacctgcctctgcgcctggcgccatggcccctgggccccgtctttatctgtggaatgcgcacaaagcttgctgttccgccc

SEQ ID NO: 25132 - DNA, 122 bp, Homo sapiens
  misc_feature (61)..(62): /note="This region represents a CpG dinucleotide"
  misc_feature (61)..(61): /note="Nucleotide may be methylated to form 5-methylcytosine"
caaccaaagctctccccttcagcagcagcttgaggcagtcgggctggttgtagagtgctgcgtagtgcagagccgtgttcccgtcagcagccttggcatccaggtgaccactggggagagga

SEQ ID NO: 25133 - DNA, 122 bp, Homo sapiens
  misc_feature (61)..(62): /note="This region represents a CpG dinucleotide"
  misc_feature (61)..(61): /note="Nucleotide may be methylated to form 5-methylcytosine"
ccaagtgggtgaaacaggaggatttcatttaggttcgcaacagctcagcagatttgcatccgaaagctgagccctgaacaaagacacggcttggcttgtgtaggcaagcttacagaagcaga

SEQ ID NO: 25134 - DNA, 122 bp, Homo sapiens
  misc_feature (61)..(62): /note="This region represents a CpG dinucleotide"
  misc_feature (61)..(61): /note="Nucleotide may be methylated to form 5-methylcytosine"
tgtacgacgacagtggatctgatcaccgagacggctgctgagtaactaacgagtggggcgcgtctacactgtggaggtgctggacagagggaggagtcgcctcctgggctggtcggagtagg

SEQ ID NO: 25135 - DNA, 122 bp, Homo sapiens
  misc_feature (61)..(62): /note="This region represents a CpG dinucleotide"
  misc_feature (61)..(61): /note="Nucleotide may be methylated to form 5-methylcytosine"
gctgattggtcaggtaggagatgaaatcacaggggatcaaagggggttcttgcagtcttccgttcctaagtgggatcaaagaactggtggaaccagatcaccagcctggatggtgtcagctg

SEQ ID NO: 25136 - DNA, 122 bp, Homo sapiens
  misc_feature (61)..(62): /note="This region represents a CpG dinucleotide"
  misc_feature (61)..(61): /note="Nucleotide may be methylated to form 5-methylcytosine"
cggcagcaagtcctagaactggaaaaagaatttcattttaacaggtatctgacaaggcgccgtcggattgaaatcgctcacaccctgtgtctgtcggagcgccagatcaagatctggttcca

SEQ ID NO: 25137 - DNA, 122 bp, Homo sapiens
  misc_feature (61)..(62): /note="This region represents a CpG dinucleotide"
  misc_feature (61)..(61): /note="Nucleotide may be methylated to form 5-methylcytosine"
tcacctgggtgacaggcacagtgcaggagtgtgagctatcgaaacaacctggtgaagtctcgcaaggcccagcaaacttgtttacattcctcagcactagaaaagaaaaggtaggttggtcc

SEQ ID NO: 25138 - DNA, 122 bp, Homo sapiens
  misc_feature (61)..(62): /note="This region represents a CpG dinucleotide"
  misc_feature (61)..(61): /note="Nucleotide may be methylated to form 5-methylcytosine"
tcacttgtatttaaatgaccaacaatctacatagtttatgacaaggtacaaaaacaaaaacgaggagataagtttatttgcccagtgcccagaactgatgcaaagtttgccctcagtgatct

SEQ ID NO: 25139 - DNA, 122 bp, Homo sapiens
  misc_feature (61)..(62): /note="This region represents a CpG dinucleotide"
  misc_feature (61)..(61): /note="Nucleotide may be methylated to form 5-methylcytosine"
cgccgtaaaccctaagtgttcaaattctttcatacacattcatttactgtgcaccgactacgtgcattaagaaagggtccctgccactgagcagctcactgtccagtagggaaagccagatc

SEQ ID NO: 25140 - DNA, 122 bp, Homo sapiens
  misc_feature (61)..(62): /note="This region represents a CpG dinucleotide"
  misc_feature (61)..(61): /note="Nucleotide may be methylated to form 5-methylcytosine"
aaattcctgtcctaaggaagaaattagtcataaaaagctctgagggtataaagcagaaaacgtgccaagcagagagacaaaccaggacatttcaagcaagtatggctcaaagtagagtcaag

SEQ ID NO: 25141 - DNA, 122 bp, Homo sapiens
  misc_feature (61)..(62): /note="This region represents a CpG dinucleotide"
  misc_feature (61)..(61): /note="Nucleotide may be methylated to form 5-methylcytosine"
aagttccccttaaaagcctacagacagaaattcataaatcaacgagaccagctgtcaagacgtgtcacactactgtctctgctgccactgttaatcacagcataaaggcatgaagatgccac

SEQ ID NO: 25142 - DNA, 122 bp, Homo sapiens
  misc_feature (61)..(62): /note="This region represents a CpG dinucleotide"
  misc_feature (61)..(61): /note="Nucleotide may be methylated to form 5-methylcytosine"
tttcacggtctcttccctgtaatgactgtgcactagcaagtccttcctgttctttgtcagcgttcttgatgtggcgatttgaaatgtaaacgtatctccattagggccgaaataacaagcat

SEQ ID NO: 25143 - DNA, 122 bp, Homo sapiens
  misc_feature (61)..(62): /note="This region represents a CpG dinucleotide"
  misc_feature (61)..(61): /note="Nucleotide may be methylated to form 5-methylcytosine"
ttagccgggcatggtggtgcattcctgtaatcaatctcagctactcaggaggctgacgtacgagaatcactttagcccagaaggcggtgcttgcaatgagccaagattgagtcactgcactc

SEQ ID NO: 25144 - DNA, 122 bp, Homo sapiens
  misc_feature (61)..(62): /note="This region represents a CpG dinucleotide"
  misc_feature (61)..(61): /note="Nucleotide may be methylated to form 5-methylcytosine"
cctgatgctaagcgttggcaaggatttgtggggccacttaaccatgctggtgggctggtacgtccattgtggggtgagggtgcctttccacgtcagtacatgaagcatccttattacagctg

SEQ ID NO: 25145 - DNA, 122 bp, Homo sapiens
  misc_feature (61)..(62): /note="This region represents a CpG dinucleotide"
  misc_feature (61)..(61): /note="Nucleotide may be methylated to form 5-methylcytosine"
cataccaggcgctttggctcccagaataagcaggctatcatgctatgtccgacatctaggcgttggtacgtactgttcccttggcctggaacattctgccctctctcaccctctcttttctt

SEQ ID NO: 25146 - DNA, 122 bp, Homo sapiens
  misc_feature (61)..(62): /note="This region represents a CpG dinucleotide"
  misc_feature (61)..(61): /note="Nucleotide may be methylated to form 5-methylcytosine"
tgttatagccctgtgtttccttctctgtccttccatattctctataatgactactcagcacgattattcaattgcttagaaaagaaaaacacaggaaggacagagaagtggatattttagtc

SEQ ID NO: 25147 - DNA, 122 bp, Homo sapiens
  misc_feature (61)..(62): /note="This region represents a CpG dinucleotide"
  misc_feature (61)..(61): /note="Nucleotide may be methylated to form 5-methylcytosine"
tcctgagtcactcagtgatggagggaagcctgtaggacttgatagacaaggatcacttcacgatgagtcacatttgatcctcacttgggccatgagaagagggggactgctgaagtgggttt

SEQ ID NO: 25148 - DNA, 122 bp, Homo sapiens
  misc_feature (61)..(62): /note="This region represents a CpG dinucleotide"
  misc_feature (61)..(61): /note="Nucleotide may be methylated to form 5-methylcytosine"
aagatgagtaagccatcagagagcttacaatcaagaaatggtattgtattcagcccctatcgcatgctttgtacaaagcaggtacacacaaaaaaatctcatgggaagcctgcagaaattac

SEQ ID NO: 25149 - DNA, 122 bp, Homo sapiens
  misc_feature (61)..(62): /note="This region represents a CpG dinucleotide"
  misc_feature (61)..(61): /note="Nucleotide may be methylated to form 5-methylcytosine"
agagtggcatgaaccctgagtgtgatgtgattcatcggaagattacaaggggaggcatgacgtgctgatgtggcttttgacaagattcctcaggctgccacactgagagacatggcaaatgc

SEQ ID NO: 25150 - DNA, 122 bp, Homo sapiens
  misc_feature (61)..(62): /note="This region represents a CpG dinucleotide"
  misc_feature (61)..(61): /note="Nucleotide may be methylated to form 5-methylcytosine"
aggtactgtgggtgcatcttgtcctcaattttcaccatctatgcatgcaggcatctatgccgagaagtcttcctttaaagcttccacatagttactaccacatcctgtctaaaagacccttc

SEQ ID NO: 25151 - DNA, 122 bp, Homo sapiens
  misc_feature (61)..(62): /note="This region represents a CpG dinucleotide"
  misc_feature (61)..(61): /note="Nucleotide may be methylated to form 5-methylcytosine"
gtgggattaagttatcgagaatagcctccttgtgatctgacgcagactcactggctgggccgtgtcttccaccagggcatctgagttgactactgagttgtatgctagtcacccagattcca

SEQ ID NO: 25152 - DNA, 122 bp, Homo sapiens
  misc_feature (61)..(62): /note="This region represents a CpG dinucleotide"
  misc_feature (61)..(61): /note="Nucleotide may be methylated to form 5-methylcytosine"
tagatcagaggaattcccattaaagtcttaaggcaaggatagttgctatcatggtcactgcgttggtgatcataaccaaaataatatgacaagaaagaaattaggtaaattgattagaagtg

SEQ ID NO: 25153 - DNA, 122 bp, Homo sapiens
  misc_feature (61)..(62): /note="This region represents a CpG dinucleotide"
  misc_feature (61)..(61): /note="Nucleotide may be methylated to form 5-methylcytosine"
attgacagagtgttcttaaaatatggccactgaatcacatccgacttttctttctgcagacgccgaaccagtcagggtacatttctctgttaataacatctcctttcagaaggcatctactc

SEQ ID NO: 25154 - DNA, 122 bp, Homo sapiens
  misc_feature (61)..(62): /note="This region represents a CpG dinucleotide"
  misc_feature (61)..(61): /note="Nucleotide may be methylated to form 5-methylcytosine"
tggttctccaagagcaggtagcctgacccctggttaagtgcagactccaggtggctcagccggcacctgatggtcagcagcacacatcagacacgcagctcaaccgtccagttcctccggat

SEQ ID NO: 25155 - DNA, 122 bp, Homo sapiens
  misc_feature (61)..(62): /note="This region represents a CpG dinucleotide"
  misc_feature (61)..(61): /note="Nucleotide may be methylated to form 5-methylcytosine"
aagataaatggaaatttaagagataaaaaataaaatatttgctttcgttgctgcagcagacgctgtgagtattttcaatgcttcagaagaggcttgcctctagtgtcctccgctgtggcaaa

SEQ ID NO: 25156 - DNA, 122 bp, Homo sapiens
  misc_feature (61)..(62): /note="This region represents a CpG dinucleotide"
  misc_feature (61)..(61): /note="Nucleotide may be methylated to form 5-methylcytosine"
agggctgatgctcttgacaaccattgtttgatttgagcccctgcctactctgctgaatgccgtgtttccacatcaggaaaggaacttgatctttgcacctgctgcctcctccttagaggggc

SEQ ID NO: 25157 - DNA, 122 bp, Homo sapiens
  misc_feature (61)..(62): /note="This region represents a CpG dinucleotide"
  misc_feature (61)..(61): /note="Nucleotide may be methylated to form 5-methylcytosine"
tgttcacaccaccctgtctactcagagggacttgagtctgctcccccacagggtacgttacgactacaccaggcatttgggaaagccaccacaataagactatctgtatccaagaaaataat

SEQ ID NO: 25158 - DNA, 122 bp, Homo sapiens
  misc_feature (61)..(62): /note="This region represents a CpG dinucleotide"
  misc_feature (61)..(61): /note="Nucleotide may be methylated to form 5-methylcytosine"
agtccctccacctgggcaccaggtgtaagcctgacctgtgccgtgtacacagtgctcattcgtgccctgagacaggaagctacagagatccagaccaacagctcacagtaagcttgggccag

SEQ ID NO: 25159 - DNA, 122 bp, Homo sapiens
  misc_feature (61)..(62): /note="This region represents a CpG dinucleotide"
  misc_feature (61)..(61): /note="Nucleotide may be methylated to form 5-methylcytosine"
ggcaaattggtcaacactcctgactgccaaattatctagtatagactatctctaactgcacggaaactggcgtttccttatcctcatctgtataatggcaacatttctctgctgcttcaaaa

SEQ ID NO: 25160 - DNA, 122 bp, Homo sapiens
  misc_feature (61)..(62): /note="This region represents a CpG dinucleotide"
  misc_feature (61)..(61): /note="Nucleotide may be methylated to form 5-methylcytosine"
cagcggccttgtggtaggaaaagactatctgtggcaaggttctggttggtttattttttgcgcaagacaagcatgaagaaaagaaaatgaagtaataggtaagccaactccacactatatga

SEQ ID NO: 25161 - DNA, 122 bp, Homo sapiens
  misc_feature (61)..(62): /note="This region represents a CpG dinucleotide"
  misc_feature (61)..(61): /note="Nucleotide may be methylated to form 5-methylcytosine"
gttctagaccattagagccttttcagcttccttattaacatttattcatttctaattacacgagtagagggaagttgcaagaaatgtgtccctgaagattttcaaacttaatgcaaccattg

SEQ ID NO: 25162 - DNA, 122 bp, Homo sapiens
  misc_feature (61)..(62): /note="This region represents a CpG dinucleotide"
  misc_feature (61)..(61): /note="Nucleotide may be methylated to form 5-methylcytosine"
tttcagctaatttggagtgaggaggaagaaagttgcaatgaaaaaaacagggaacccaaacgctcttgctgatgaaagagcctcagtcattgactgcagcacatcaaagagcacaagatggg

SEQ ID NO: 25163 - DNA, 122 bp, Homo sapiens
  misc_feature (61)..(62): /note="This region represents a CpG dinucleotide"
  misc_feature (61)..(61): /note="Nucleotide may be methylated to form 5-methylcytosine"
ttgaagtaaacctggctatagagagggtgcaatttatgttgcctgccacgttccctggttcggtaagattttcagttaaagtcatcctccttcacttccgttttgccccagggaagggagac

SEQ ID NO: 25164 - DNA, 122 bp, Homo sapiens
  misc_feature (61)..(62): /note="This region represents a CpG dinucleotide"
  misc_feature (61)..(61): /note="Nucleotide may be methylated to form 5-methylcytosine"
tcttcctttcctctcctctcccacttatgaagggagtccagtcagaaacatgtttgtctacgaggtagtatatctggtatttctgaggaattcggttattatataggattatagaatattca

SEQ ID NO: 25165 - DNA, 122 bp, Homo sapiens
  misc_feature (61)..(62): /note="This region represents a CpG dinucleotide"
  misc_feature (61)..(61): /note="Nucleotide may be methylated to form 5-methylcytosine"
ccacaagccttttctgcctaacccacagcatgtagaatctccatgagacgtttaagtacccgacaaactcctcagtgggaaaccatttgagggcagactggccagaaagcacagatgggaat

SEQ ID NO: 25166 - DNA, 122 bp, Homo sapiens
  misc_feature (61)..(62): /note="This region represents a CpG dinucleotide"
  misc_feature (61)..(61): /note="Nucleotide may be methylated to form 5-methylcytosine"
ggttagccaaccatgggctatcattatacaccagcagttcagtcgggttggtacagcagccgcaaataagaagaaaaaaagaaaaaaaaacgaaaggaaaaaagttgtggggtgggggcatt

SEQ ID NO: 25167 - DNA, 122 bp, Homo sapiens
  misc_feature (61)..(62): /note="This region represents a CpG dinucleotide"
  misc_feature (61)..(61): /note="Nucleotide may be methylated to form 5-methylcytosine"
ttaatatgtggcttaaacccagcactcagacatctgagaacacgcattggattcctgaggcgtcacagcaatgctcagcaggctggctgccacatggtggcccaagaagcaggtgcttgtta

SEQ ID NO: 25168 - DNA, 122 bp, Homo sapiens
  misc_feature (61)..(62): /note="This region represents a CpG dinucleotide"
  misc_feature (61)..(61): /note="Nucleotide may be methylated to form 5-methylcytosine"
cacagagtcatagctcaagggaatctgggaagggttgttttagctttccaacttctgcagcgcagaagaaacactgaaagcagttttagattaatgttgaggagcccgtctattatggacaa

SEQ ID NO: 25169 - DNA, 122 bp, Homo sapiens
  misc_feature (61)..(62): /note="This region represents a CpG dinucleotide"
  misc_feature (61)..(61): /note="Nucleotide may be methylated to form 5-methylcytosine"
caccacactgtcactgcctttgtaatcacttgctaatgggagcagcagcagcgaccgagacgtgcacttagccgctgtgtttacaggaggtccccgtggcccggatgcatgctttcctctgg

SEQ ID NO: 25170 - DNA, 122 bp, Homo sapiens
  misc_feature (61)..(62): /note="This region represents a CpG dinucleotide"
  misc_feature (61)..(61): /note="Nucleotide may be methylated to form 5-methylcytosine"
tagctaagcctcgaagcgaagctgggatgtagctggcacctgcatggccatgggctgggccgacatagtctcagaactgatctgggcactgtggctgattggcaagtgttaagtaggccagg

SEQ ID NO: 25171 - DNA, 122 bp, Homo sapiens
  misc_feature (61)..(62): /note="This region represents a CpG dinucleotide"
  misc_feature (61)..(61): /note="Nucleotide may be methylated to form 5-methylcytosine"
gtggctcccctgggtccaggccaggcccagcaggagcaggagcagagcagaggcagtggccggcttcatgttcatgtgcttgtggaggccccagccctcggcctcggcttttatgctaggga

SEQ ID NO: 25172 - DNA, 122 bp, Homo sapiens
  misc_feature (61)..(62): /note="This region represents a CpG dinucleotide"
  misc_feature (61)..(61): /note="Nucleotide may be methylated to form 5-methylcytosine"
aacaccttgctctccgtgcttacagatgtacaagggcagccgtggggctggcaacagcttcgtaatcctggcttcctgctttctgggtcaaagccctggtggtgtgttcttgatatcggtcc

SEQ ID NO: 25173 - DNA, 122 bp, Homo sapiens
  misc_feature (61)..(62): /note="This region represents a CpG dinucleotide"
  misc_feature (61)..(61): /note="Nucleotide may be methylated to form 5-methylcytosine"
ctatttctggctcgaagtgaccttgaggaagttacacatatgttcttctcatttgtacagcgaataagcaaattaagataaaagcaactattgctgagcggactgtaggactgcaagatatg

SEQ ID NO: 25174 - DNA, 122 bp, Homo sapiens
  misc_feature (61)..(62): /note="This region represents a CpG dinucleotide"
  misc_feature (61)..(61): /note="Nucleotide may be methylated to form 5-methylcytosine"
ttctgtttgggatgatgaaaagtttaggaaaaggagagtggcaatgattgcacaacaatgcgaacgtcctcaatgccattgaatggtgcacttgaaaacggtcaaaatgggaaatttcatgt

SEQ ID NO: 25175 - DNA, 122 bp, Homo sapiens
  misc_feature (61)..(62): /note="This region represents a CpG dinucleotide"
  misc_feature (61)..(61): /note="Nucleotide may be methylated to form 5-methylcytosine"
atgtcccaggtgagccctccgcgggcaggtgtgctgagggttggagacgggggtcctccccggggctgacagtcgaggggctgacgtgctgctccacctctgggcctgcaaaggagagggaa

SEQ ID NO: 25176 - DNA, 122 bp, Homo sapiens
  misc_feature (61)..(62): /note="This region represents a CpG dinucleotide"
  misc_feature (61)..(61): /note="Nucleotide may be methylated to form 5-methylcytosine"
cacaaaaggaaaagaattaggaaatgcgtctcctttccctgattcacccctctgtgatatcgccctccactggcattgtggtgtgtgcttcctagaacaataggccatcaaatcatgtagtg

SEQ ID NO: 25177 - DNA, 122 bp, Homo sapiens
  misc_feature (61)..(62): /note="This region represents a CpG dinucleotide"
  misc_feature (61)..(61): /note="Nucleotide may be methylated to form 5-methylcytosine"
ctattggtgtggactgaaggggaatcattctgctgaagtaaaacatgactttgacctggacgtcagagcaaagcaaaggtgggacaccacagcatggggggtgcccagatggcagaggccag

SEQ ID NO: 25178 - DNA, 122 bp, Homo sapiens
  misc_feature (61)..(62): /note="This region represents a CpG dinucleotide"
  misc_feature (61)..(61): /note="Nucleotide may be methylated to form 5-methylcytosine"
gacgtgtactgcatgtatccaccactgggcagtgtgcctcacaagtgagactgatgctcacgtgagcttgtgaagtcaggggcaaaacattgcaatcagactctaaacccatacatttaaat

SEQ ID NO: 25179 - DNA, 122 bp, Homo sapiens
  misc_feature (61)..(62): /note="This region represents a CpG dinucleotide"
  misc_feature (61)..(61): /note="Nucleotide may be methylated to form 5-methylcytosine"
ccgttcatccccggcagggcaggacggggcagggggccgacttactgcacgcgctgtggtcggtccagccgtacagcaccattccctcctgggcacaggtccgggcgtactccaggagggca

SEQ ID NO: 25180 - DNA, 122 bp, Homo sapiens
  misc_feature (61)..(62): /note="This region represents a CpG dinucleotide"
  misc_feature (61)..(61): /note="Nucleotide may be methylated to form 5-methylcytosine"
caagcctgttccttagctttatgcttctccaggcaagctgacattgcctaactcaagaatcgattttgtgtcagaagtcagctgatggtgtttgtttaaaaaaaaaaaatggtattttcagc

SEQ ID NO: 25181 - DNA, 122 bp, Homo sapiens
  misc_feature (61)..(62): /note="This region represents a CpG dinucleotide"
  misc_feature (61)..(61): /note="Nucleotide may be methylated to form 5-methylcytosine"
atccacccgcctcagcctccgaaagtgctgggattacaggcgtgagccaccgcgcccggccgacactgagctaagacttcatgaagaagtggatcaggcttgaggctcaagtgctagcaaac

SEQ ID NO: 25182 - DNA, 122 bp, Homo sapiens
  misc_feature (61)..(62): /note="This region represents a CpG dinucleotide"
  misc_feature (61)..(61): /note="Nucleotide may be methylated to form 5-methylcytosine"
ccccgtgtgcagactctgatacatcctaaatcaagtcctcttttgagtgctcttggaaaccgcactcccaggcacattgttgggtatagatttactgatactgtgaagggattggaacccag

SEQ ID NO: 25183 - DNA, 122 bp, Homo sapiens
  misc_feature (61)..(62): /note="This region represents a CpG dinucleotide"
  misc_feature (61)..(61): /note="Nucleotide may be methylated to form 5-methylcytosine"
gggtgagtccttctcacgcttcaaatttctcctccccgctcttctgtctcttctctttgacgcacctgggaaagcttctgtgcttttaaggactcatgtgattagtttggtctcacccaggt

SEQ ID NO: 25184 - DNA, 122 bp, Homo sapiens
  misc_feature (61)..(62): /note="This region represents a CpG dinucleotide"
  misc_feature (61)..(61): /note="Nucleotide may be methylated to form 5-methylcytosine"
tgttttggcgagtagccagtctttctttaacatcaatcaaccgtagcaatgtggtcatcacgaagtcttcattgactcactggcttggattttagggttagaaaatctgaatgttcttatgt

SEQ ID NO: 25185 - DNA, 122 bp, Homo sapiens
  misc_feature (61)..(62): /note="This region represents a CpG dinucleotide"
  misc_feature (61)..(61): /note="Nucleotide may be methylated to form 5-methylcytosine"
cagattttaggcgcttcacattcctgtcctattttatttacagtcaaaaacaatgttgttcgatgggcaggaaaaccaattcagcctttgcacaatgatcccctagagatcagaatccaggg

SEQ ID NO: 25186 - DNA, 122 bp, Homo sapiens
  misc_feature (61)..(62): /note="This region represents a CpG dinucleotide"
  misc_feature (61)..(61): /note="Nucleotide may be methylated to form 5-methylcytosine"
tctctggcgtccaccctcttatctggaataccgggacagcgaccctcccacagaggaaaacgccgcgtgctggccgggaggacagggcccatctttggcagctctgatcgcccacgccagga

SEQ ID NO: 25187 - DNA, 122 bp, Homo sapiens
  misc_feature (61)..(62): /note="This region represents a CpG dinucleotide"
  misc_feature (61)..(61): /note="Nucleotide may be methylated to form 5-methylcytosine"
cagttgctaaattcctagggcaggaaagggcagggccctcatgaaacgagggctgagtgacgagccaggaaagctcagatatgagtgccatggaactggagaggcaagaagggcaatgagca

SEQ ID NO: 25188 - DNA, 122 bp, Homo sapiens
  misc_feature (61)..(62): /note="This region represents a CpG dinucleotide"
  misc_feature (61)..(61): /note="Nucleotide may be methylated to form 5-methylcytosine"
gaatctctgtcactggggcaagaaattacagctgtgaacctgctggttagtgttctgtgccgaggccttgaacttatgattaacgtggttgacgtttctgtccagctcatcccatgctcagt

SEQ ID NO: 25189 - DNA, 122 bp, Homo sapiens
  misc_feature (61)..(62): /note="This region represents a CpG dinucleotide"
  misc_feature (61)..(61): /note="Nucleotide may be methylated to form 5-methylcytosine"
gagcatgtttgggtggaggccctcaaatcaggagttcaggtttggacatgttgagtgtgacgcacattagtgttccaagtggatgtggtaagtaggcagttagatataagaacctaagtcag

SEQ ID NO: 25190 - DNA, 122 bp, Homo sapiens
  misc_feature (61)..(62): /note="This region represents a CpG dinucleotide"
  misc_feature (61)..(61): /note="Nucleotide may be methylated to form 5-methylcytosine"
ccctcccattatgtgttcttcaagctctttaattttatcttcaactgcactggccgagaccgtttcccccattaactatttgtgatcacagtttactgcaagcctgcttgacccagcttata

SEQ ID NO: 25191 - DNA, 122 bp, Homo sapiens
  misc_feature (61)..(62): /note="This region represents a CpG dinucleotide"
  misc_feature (61)..(61): /note="Nucleotide may be methylated to form 5-methylcytosine"
catttgttatttagcattcattaggagccaatgagatagtccttataactctaaattctacgcagaacttatcaattcccagtggacaatgttgctttcttctctacattctttcctctgat

SEQ ID NO: 25192 - DNA, 122 bp, Homo sapiens
  misc_feature (61)..(62): /note="This region represents a CpG dinucleotide"
  misc_feature (61)..(61): /note="Nucleotide may be methylated to form 5-methylcytosine"
ggatcactcaaacatgaaacagagaagaaaggccagtgtttattcctttaagaaggcagtcgtgcaacttgttaaactttatcccatttgctggggtaagggagaaaaaaaaagagagacag

SEQ ID NO: 25193 - DNA, 122 bp, Homo sapiens
  misc_feature (61)..(62): /note="This region represents a CpG dinucleotide"
  misc_feature (61)..(61): /note="Nucleotide may be methylated to form 5-methylcytosine"
ttataatacttataatatatgatgtcttctaccactcagcaattctggcatgaacacatacgtaacaattattgacagtggagggacgggaaaaaaaaaagccactttcctttgctctagtc

SEQ ID NO: 25194 - DNA, 122 bp, Homo sapiens
  misc_feature (61)..(62): /note="This region represents a CpG dinucleotide"
  misc_feature (61)..(61): /note="Nucleotide may be methylated to form 5-methylcytosine"
agtgctgggattacaagcatgtgctactgtgtccggctgttacattccttcttaaggaagcgttcttggctgggtgcaatggctcacaccctgtctctactaaaatacaaaaattagccagg

SEQ ID NO: 25195 - DNA, 122 bp, Homo sapiens
  misc_feature (61)..(62): /note="This region represents a CpG dinucleotide"
  misc_feature (61)..(61): /note="Nucleotide may be methylated to form 5-methylcytosine"
tgcttacctttgagaaaatgcactcaaatcaacatgatacgatgctttcagtatagtagacggctctgtaagcctaacattttggtaggaagccttagtttacacgggcagtaacaaaagtt

SEQ ID NO: 25196 - DNA, 122 bp, Homo sapiens
  misc_feature (61)..(62): /note="This region represents a CpG dinucleotide"
  misc_feature (61)..(61): /note="Nucleotide may be methylated to form 5-methylcytosine"
ctggcatagaattcctttgatttcttctacttcctcttgggacatgggtcacacggaaggcggccctatccttggctgtcagaaccccataagcccaaccatatcctaggcctctccttgtc

SEQ ID NO: 25197 - DNA, 122 bp, Homo sapiens
  misc_feature (61)..(62): /note="This region represents a CpG dinucleotide"
  misc_feature (61)..(61): /note="Nucleotide may be methylated to form 5-methylcytosine"
ttagaaaaagcctctgtcagtgacaagttaatcagtttaagatagttcaaaagtgtccttcgagtgcttagtttcttcaagtgctttaaagtgctttagaaacaagttacagttggtggaaa

SEQ ID NO: 25198 - DNA, 122 bp, Homo sapiens
  misc_feature (61)..(62): /note="This region represents a CpG dinucleotide"
  misc_feature (61)..(61): /note="Nucleotide may be methylated to form 5-methylcytosine"
tgctggcttcgtgtgaggtcatctatgtgcatggaccggcccctagaatcctccccagcccggttcacagatgacaaacctgaggcaagaaggctcataggtcaatgcagccaggaggggtc

SEQ ID NO: 25199 - DNA, 122 bp, Homo sapiens
  misc_feature (61)..(62): /note="This region represents a CpG dinucleotide"
  misc_feature (61)..(61): /note="Nucleotide may be methylated to form 5-methylcytosine"
gctactttaaaggcaaggctgtcctgattcacccaccctctgagcccctgtgttgagaagcgagttgaaggatggacatggttacatgctcaaaatctccaggtgctcaatccctcacacta

SEQ ID NO: 25200 - DNA, 122 bp, Homo sapiens
  misc_feature (61)..(62): /note="This region represents a CpG dinucleotide"
  misc_feature (61)..(61): /note="Nucleotide may be methylated to form 5-methylcytosine"
cttcctctacttacagccaactagtgtcatcagctatttgtgatacctcttcaaagttttcgatggcatatttgcttccattttcaaaaggaaataacaaaagaataaatcaagaactaatg

SEQ ID NO: 25201 - DNA, 122 bp, Homo sapiens
  misc_feature (61)..(62): /note="This region represents a CpG dinucleotide"
  misc_feature (61)..(61): /note="Nucleotide may be methylated to form 5-methylcytosine"
ctaaatgtgcacttcaaagattgacgaattgtctatcccactgaagagcagaaacaacaccgagggcatagcaaagttaaatgaattcccattactaaaagcaaacatataaacatctgtaa

SEQ ID NO: 25202 - DNA, 122 bp, Homo sapiens
  misc_feature (61)..(62): /note="This region represents a CpG dinucleotide"
  misc_feature (61)..(61): /note="Nucleotide may be methylated to form 5-methylcytosine"
tattaacaagcaccagagctatgtcaaaggagaatcatccaaaacattgctgagccttgacgaagatgaacagcactcaggggaagaattctaggtggatctttgggtaataggaaccctga

SEQ ID NO: 25203 - DNA, 122 bp, Homo sapiens
  misc_feature (61)..(62): /note="This region represents a CpG dinucleotide"
  misc_feature (61)..(61): /note="Nucleotide may be methylated to form 5-methylcytosine"
aatgacgtgcctagcaaagcacttggaatttaaatccactcatgcattcactgccttcagcgtcaacacagcagggttaaaccagttcttcatacttccaaagaacatgtgaagaaaatttc

SEQ ID NO: 25204 - DNA, 122 bp, Homo sapiens
  misc_feature (61)..(62): /note="This region represents a CpG dinucleotide"
  misc_feature (61)..(61): /note="Nucleotide may be methylated to form 5-methylcytosine"
cctttctctttcagatttaatcacctcccatatgctgatgacatgcagcagagacagtaacgctcaccacaagttacattcgcacctctacatttctcagcccctgcagttaggtggggcca

SEQ ID NO: 25205 - DNA, 122 bp, Homo sapiens
  misc_feature (61)..(62): /note="This region represents a CpG dinucleotide"
  misc_feature (61)..(61): /note="Nucleotide may be methylated to form 5-methylcytosine"
ttcaatgccagtcttgtataagctcctgtttggccagtgggtccagtcagaggctaaacacgcccacactctctctcagtcttgtccatacagttaatggcactccctccttcctctgtgca

SEQ ID NO: 25206 - DNA, 122 bp, Homo sapiens
  misc_feature (61)..(62): /note="This region represents a CpG dinucleotide"
  misc_feature (61)..(61): /note="Nucleotide may be methylated to form 5-methylcytosine"
ggtcaaactcatagatgcaggaagtcacatggtggtttctggggactgggagaggggaaacggacagttgtgttccataggtatcaagttttcagttatacaaggtgagtaagtttagagat

SEQ ID NO: 25207 - DNA, 122 bp, Homo sapiens
  misc_feature (61)..(62): /note="This region represents a CpG dinucleotide"
  misc_feature (61)..(61): /note="Nucleotide may be methylated to form 5-methylcytosine"
ccagggctgagaagagagcctgagcatggcccccagcatcactagggctaagctgcatgtcgctgggcgggccctacgcctctccgagctcacaggctagacctgaccaggcgcactgccca

SEQ ID NO: 25208 - DNA, 122 bp, Homo sapiens
  misc_feature (61)..(62): /note="This region represents a CpG dinucleotide"
  misc_feature (61)..(61): /note="Nucleotide may be methylated to form 5-methylcytosine"
agtagaaaaattgaaggccacttgttcttgatcctacaaaagaattgcagagcactaactcgtaaggcctctgatatcccctcccccaccattaagtatctgttgtcattcgttacagatta

SEQ ID NO: 25209 - DNA, 122 bp, Homo sapiens
  misc_feature (61)..(62): /note="This region represents a CpG dinucleotide"
  misc_feature (61)..(61): /note="Nucleotide may be methylated to form 5-methylcytosine"
catgcttatctcacccaagctccaaataagtatctcttctgtcatctacatatagttgtccggtcctgagcaaactggacaggaaggggtgggtggggctggggggagctgagcatcctcac

SEQ ID NO: 25210 - DNA, 122 bp, Homo sapiens
  misc_feature (61)..(62): /note="This region represents a CpG dinucleotide"
  misc_feature (61)..(61): /note="Nucleotide may be methylated to form 5-methylcytosine"
tgtaaatcctcttaggatttagctgcttaaagacaatctaaacggtacagtggccttggacgtcatcatacaggtccctgaagatagcatgccaaataggtaagcctggtatatggtagtca

SEQ ID NO: 25211 - DNA, 122 bp, Homo sapiens
  misc_feature (61)..(62): /note="This region represents a CpG dinucleotide"
  misc_feature (61)..(61): /note="Nucleotide may be methylated to form 5-methylcytosine"
ataaatagcagtaccattttacaaaatcagaagctaggaaaatgtatttggcctttgactcgtggttggtcctcagtgaatgttcagtgaatagaattataaaatctctttgttcttttttg

SEQ ID NO: 25212 - DNA, 122 bp, Homo sapiens
  misc_feature (61)..(62): /note="This region represents a CpG dinucleotide"
  misc_feature (61)..(61): /note="Nucleotide may be methylated to form 5-methylcytosine"
tgcatttgaatgggctgtgttaacaaagctgttccaaaaaccggatctgcaacacagtatcgcttgccttggagatttctccttcaccgtggtgagtcagagctgctgggtaatgtgactta

SEQ ID NO: 25213 - DNA, 122 bp, Homo sapiens
  misc_feature (61)..(62): /note="This region represents a CpG dinucleotide"
  misc_feature (61)..(61): /note="Nucleotide may be methylated to form 5-methylcytosine"
aacgggataaagaaacacagaagaccaaataatgaagaaggactagaaaacatttttgtacgtacttcatatgtgaagctactgctctggggggagatccatccagtgaaagcacgggcctg

SEQ ID NO: 25214 - DNA, 122 bp, Homo sapiens
  misc_feature (61)..(62): /note="This region represents a CpG dinucleotide"
  misc_feature (61)..(61): /note="Nucleotide may be methylated to form 5-methylcytosine"
taaactgacattttcacaacaagaactgcacaccaaagcaaacattagaaatttcaggcccgttcactctgtggaaatatctttacatcctgttaccaaatagataaaagctcagttagaaa

SEQ ID NO: 25215 - DNA, 122 bp, Homo sapiens
  misc_feature (61)..(62): /note="This region represents a CpG dinucleotide"
  misc_feature (61)..(61): /note="Nucleotide may be methylated to form 5-methylcytosine"
gaaagagtctacaccagttcacacaaggacagcacactctagagttgtatagtgtggccccgccagcattaagcaggaaactagggtgtggcctgttcagggaagggggttacttctctact

SEQ ID NO: 25216 - DNA, 122 bp, Homo sapiens
  misc_feature (61)..(62): /note="This region represents a CpG dinucleotide"
  misc_feature (61)..(61): /note="Nucleotide may be methylated to form 5-methylcytosine"
tctctctctctctcttctgctcccatgtaaggcctgccttgcttcccctttgccttccaccgtaattttaagtttcctgaggcctcctagctaggcttcctgttaagcctacagaactgtga

SEQ ID NO: 25217 - DNA, 122 bp, Homo sapiens
  misc_feature (61)..(62): /note="This region represents a CpG dinucleotide"
  misc_feature (61)..(61): /note="Nucleotide may be methylated to form 5-methylcytosine"
ccagatctttttttagtggttcctcaaatgtacttccttcaataggttttctataaccaccgcatctaaagtaggatttcctcactcattattctttacctcattcctgttttactttcctc

SEQ ID NO: 25218 - DNA, 122 bp, Homo sapiens
  misc_feature (61)..(62): /note="This region represents a CpG dinucleotide"
  misc_feature (61)..(61): /note="Nucleotide may be methylated to form 5-methylcytosine"
gtgcatgtatgcatgcattcctgtgaccttctcgtgtgttcacgggtgtgtgggtacagccgcttgctgggtgtgtctgcttggccagggatgtgtatgtggggttctgtctgggacaactg

SEQ ID NO: 25219 - DNA, 122 bp, Homo sapiens
  misc_feature (61)..(62): /note="This region represents a CpG dinucleotide"
  misc_feature (61)..(61): /note="Nucleotide may be methylated to form 5-methylcytosine"
tgattctgggtgaaggtcacagcatgactcacagtatcttacacaccttggatgtatatacgcacttcttatgtcgtaagtaatccagagggaggagtttgctagagctagtccagagttca

SEQ ID NO: 25220 - DNA, 122 bp, Homo sapiens
  misc_feature (61)..(62): /note="This region represents a CpG dinucleotide"
  misc_feature (61)..(61): /note="Nucleotide may be methylated to form 5-methylcytosine"
tcctggtaccaggctttctctcctgttatatagaacatcttcctgtctctgacctcagggcgtctctcttaccctggagtctctacttcccatcccccatccacacaacccagaatacaccc

SEQ ID NO: 25221 - DNA, 122 bp, Homo sapiens
  misc_feature (61)..(62): /note="This region represents a CpG dinucleotide"
  misc_feature (61)..(61): /note="Nucleotide may be methylated to form 5-methylcytosine"
taaaaaaaacccacaaatagaatgaggacaatgctgatgatgacatctgcagagggaagacgacagaccatttccgcaacactgaacccagagtgaagaacgttgctggaggaaatagcaga

SEQ ID NO: 25222 - DNA, 122 bp, Homo sapiens
  misc_feature (61)..(62): /note="This region represents a CpG dinucleotide"
  misc_feature (61)..(61): /note="Nucleotide may be methylated to form 5-methylcytosine"
acgttttttatgggaaggtcgtggcggcagctacacagggcttcttacacgagctgagagcgacatctggtccagacagatgacaggtgcaaaatgaagcaggatgtttcagggattgtcgt

SEQ ID NO: 25223 - DNA, 122 bp, Homo sapiens
  misc_feature (61)..(62): /note="This region represents a CpG dinucleotide"
  misc_feature (61)..(61): /note="Nucleotide may be methylated to form 5-methylcytosine"
aggtctgaagtaccctttacccaatttccttcagtgataacatcttgcaaaactacagtacggtatcacagccaggatactgacatccgtagagtcaagttacagagtattcccttaccacc

SEQ ID NO: 25224 - DNA, 122 bp, Homo sapiens
  misc_feature (61)..(62): /note="This region represents a CpG dinucleotide"
  misc_feature (61)..(61): /note="Nucleotide may be methylated to form 5-methylcytosine"
tgaacacccttccttcagaaaaggagagtcctttgttctctgcaaattcacgcagcacaacgagtggaggaaatcacaggcctaagccaggcattaacatccacgaaaagggacagggcaaa

SEQ ID NO: 25225 - DNA, 122 bp, Homo sapiens
  misc_feature (61)..(62): /note="This region represents a CpG dinucleotide"
  misc_feature (61)..(61): /note="Nucleotide may be methylated to form 5-methylcytosine"
ttatccattcccaaccacaaagaattttctgcttcctgtagaattaaaagacaatttttacggagaggatacaaagatcctcctagacaaagcctcctgggcataatactcctagttaggag

SEQ ID NO: 25226 - DNA, 122 bp, Homo sapiens
  misc_feature (61)..(62): /note="This region represents a CpG dinucleotide"
  misc_feature (61)..(61): /note="Nucleotide may be methylated to form 5-methylcytosine"
acctgtctgaggtcacaccgctgggaagtggccccagtcagaccgaccttccagtccagccgactccagaccccatgctcatttccaacccatgagaaaggaaggagagggggtggggggaa

SEQ ID NO: 25227 - DNA, 122 bp, Homo sapiens
  misc_feature (61)..(62): /note="This region represents a CpG dinucleotide"
  misc_feature (61)..(61): /note="Nucleotide may be methylated to form 5-methylcytosine"
cccacccatcgccatcccagaaaccctcccttggacacacctggaaggtgctaagtgcaccgggcagaggaggcccctcctggccagcatgaccgtgcaccggcctgagtgggctcgggtgg

SEQ ID NO: 25228 - DNA, 122 bp, Homo sapiens
  misc_feature (61)..(62): /note="This region represents a CpG dinucleotide"
  misc_feature (61)..(61): /note="Nucleotide may be methylated to form 5-methylcytosine"
ggttgtatcatggtcctcagctgtctgtcactgagaagagtttgcaactcacagggtttacgtggtttcggttggtgcatgatgctggccttctggtgaagtattttttttatggaactgat

SEQ ID NO: 25229 - DNA, 122 bp, Homo sapiens
  misc_feature (61)..(62): /note="This region represents a CpG dinucleotide"
  misc_feature (61)..(61): /note="Nucleotide may be methylated to form 5-methylcytosine"
ggccaaatcctgtccctggaagagccacaaagtaggaagcctgggtacaggcctggcaagcgagaacaatgtgtcactgcaggactttggagctctcagctttggagtcagttaagaccagt

SEQ ID NO: 25230 - DNA, 122 bp, Homo sapiens
  misc_feature (61)..(62): /note="This region represents a CpG dinucleotide"
  misc_feature (61)..(61): /note="Nucleotide may be methylated to form 5-methylcytosine"
tgggctcaggcttgccaaggaggaaacgggcaggtccatggccagggcggccgggcgtcgcggatgcatgccggccacgggtatttctagacaagacttgcagggccgcccgtcacagaagg

SEQ ID NO: 25231 - DNA, 122 bp, Homo sapiens
  misc_feature (61)..(62): /note="This region represents a CpG dinucleotide"
  misc_feature (61)..(61): /note="Nucleotide may be methylated to form 5-methylcytosine"
cgtgttggcttttgttcttttaggaaatggatatagatgaaattttgcggttggctgaaacgagagagaatgaagtgtcaacaagtgcaacagatgaacttctatcacagtttaaggtatga

SEQ ID NO: 25232 - DNA, 122 bp, Homo sapiens
  misc_feature (61)..(62): /note="This region represents a CpG dinucleotide"
  misc_feature (61)..(61): /note="Nucleotide may be methylated to form 5-methylcytosine"
agaacttgctttgacagagctgttccagctcatttgtaataacatgcttagaaccttctgcgttcaagagcatgtcagaagggaatgcctggtcgttgtctccctgggaagcagcgtggagc

SEQ ID NO: 25233 - DNA, 122 bp, Homo sapiens
  misc_feature (61)..(62): /note="This region represents a CpG dinucleotide"
  misc_feature (61)..(61): /note="Nucleotide may be methylated to form 5-methylcytosine"
ttccttgctaccactcagagcggcagtgacacagttcccttatctcagaaggccagaagacggctgtcaaaggtcacagggaaatcaaaggcggggtacagggccagagggaggaggaaaca

SEQ ID NO: 25234 - DNA, 122 bp, Homo sapiens
  misc_feature (61)..(62): /note="This region represents a CpG dinucleotide"
  misc_feature (61)..(61): /note="Nucleotide may be methylated to form 5-methylcytosine"
cttgggcattctgctctgaacaatacatttaaacaaaattctcaatttctttttttctcccgtatccagattaatttacttgaatagactcagaaacaacattatactttattgccatctac

SEQ ID NO: 25235 - DNA, 122 bp, Homo sapiens
  misc_feature (61)..(62): /note="This region represents a CpG dinucleotide"
  misc_feature (61)..(61): /note="Nucleotide may be methylated to form 5-methylcytosine"
agctacaagtaacctgcagaataaaaggttaactgctatgaattattaagtagccacttacgtgaaatgtgaacattctctctataaagacaattcctcataaaattgtctgtctgttatcc

SEQ ID NO: 25236 - DNA, 122 bp, Homo sapiens
  misc_feature (61)..(62): /note="This region represents a CpG dinucleotide"
  misc_feature (61)..(61): /note="Nucleotide may be methylated to form 5-methylcytosine"
cttgtttataccagtttattcaatcagtgagtcagctagcatttactgaatagtcatatgcgttgcttaatgatggggataatgttctgagaagtgcatccctgggaaattttgtcattgtg

SEQ ID NO: 25237 - DNA, 122 bp, Homo sapiens
  misc_feature (61)..(62): /note="This region represents a CpG dinucleotide"
  misc_feature (61)..(61): /note="Nucleotide may be methylated to form 5-methylcytosine"
aggatctgggagtgaaggactggtcgtacctcaatgcactgctcaccctggcagaaatgacggccttctgctcctggcacaaagctcttaagtctcagaatgaaagaaaaaaaaactttcta

SEQ ID NO: 25238 - DNA, 122 bp, Homo sapiens
  misc_feature (61)..(62): /note="This region represents a CpG dinucleotide"
  misc_feature (61)..(61): /note="Nucleotide may be methylated to form 5-methylcytosine"
caaaaccataacaggagtcactgtccacttgatgactcagggcctcctggacaggaaccacgtgatgtacctctccttgaataaagttcccaggaagggtttacctctgtgcacaaggttta

SEQ ID NO: 25239 - DNA, 122 bp, Homo sapiens
  misc_feature (61)..(62): /note="This region represents a CpG dinucleotide"
  misc_feature (61)..(61): /note="Nucleotide may be methylated to form 5-methylcytosine"
attacatatacccagatggatccgattagcatagatctgctaggaatcatcatagccagacgtaggcaagacaggatcctttggttatgtgttctattaacttacttcctccagacagcttt

SEQ ID NO: 25240 - DNA, 122 bp, Homo sapiens
  misc_feature (61)..(62): /note="This region represents a CpG dinucleotide"
  misc_feature (61)..(61): /note="Nucleotide may be methylated to form 5-methylcytosine"
ttggtggcgtcagaaacacacccagcaccttgcctggagcagggcggctgggccctgctccgtgaatcccaagtgccctatgggagcctctccggccagggactgccagcctagaggagggg

SEQ ID NO: 25241 - DNA, 122 bp, Homo sapiens
  misc_feature (61)..(62): /note="This region represents a CpG dinucleotide"
  misc_feature (61)..(61): /note="Nucleotide may be methylated to form 5-methylcytosine"
cccaacctgtctttatgttttataacagctcccttcctgacccttcaggcccaggggtggcgacagtgtcactagcctggagaactgtttccagcacctgccggtagccttgcagagcacta

SEQ ID NO: 25242 - DNA, 122 bp, Homo sapiens
  misc_feature (61)..(62): /note="This region represents a CpG dinucleotide"
  misc_feature (61)..(61): /note="Nucleotide may be methylated to form 5-methylcytosine"
cgctttggtttctcccacccggcagtcatggggacgctggatgagcccatttctgaagtgcggaggggccgggcttcttaggctgtgggcggagcctgggcctgggagaggaacagggccct

SEQ ID NO: 25243 - DNA, 122 bp, Homo sapiens
  misc_feature (61)..(62): /note="This region represents a CpG dinucleotide"
  misc_feature (61)..(61): /note="Nucleotide may be methylated to form 5-methylcytosine"
cctttgttctatgacaggcaagtcagcaggatgtcaggcctggcttgatcttacacccctcgactgaatgcccgggagtccctgagcgttggggcaggaggagccttagagactgtaaggac

SEQ ID NO: 25244 - DNA, 122 bp, Homo sapiens
  misc_feature (61)..(62): /note="This region represents a CpG dinucleotide"
  misc_feature (61)..(61): /note="Nucleotide may be methylated to form 5-methylcytosine"
tttccctaatagtttgcattttaattaactttcattacattctgacttccactcaatatccgttgttttcagtaaagacttctatatgataaaacgttgtaatttttgttctggttttccaa

SEQ ID NO: 25245 - DNA, 122 bp, Homo sapiens
  misc_feature (61)..(62): /note="This region represents a CpG dinucleotide"
  misc_feature (61)..(61): /note="Nucleotide may be methylated to form 5-methylcytosine"
aagtgtatgggaagctttgtagcaggagtgtgggcgggggctggtgcctggaggggccttcgagtgaggcagcattgtatggggaccatgtggtcactgaagtcctagcagaaggatgtggt

SEQ ID NO: 25246 - DNA, 122 bp, Homo sapiens
  misc_feature (61)..(62): /note="This region represents a CpG dinucleotide"
  misc_feature (61)..(61): /note="Nucleotide may be methylated to form 5-methylcytosine"
ttcaaccagctctcctagcccagcttccatgctcttcaaggagacttcccactgaacttccgaatacccttgtgtgaaactgccacaggcagtgaatgtgctcatcagcaaacccaagtatc

SEQ ID NO: 25247 - DNA, 122 bp, Homo sapiens
  misc_feature (61)..(62): /note="This region represents a CpG dinucleotide"
  misc_feature (61)..(61): /note="Nucleotide may be methylated to form 5-methylcytosine"
aggagcgagatactcttggctagcatggattgaaaagctcctccctgctgtttctgtcttcgtaactctattgcttaggattctgtggttacaagtatcaaaactagctagatcttggtttc

SEQ ID NO: 25248 - DNA, 122 bp, Homo sapiens
  misc_feature (61)..(62): /note="This region represents a CpG dinucleotide"
  misc_feature (61)..(61): /note="Nucleotide may be methylated to form 5-methylcytosine"
aaataaaaacatgcatatttggtttttctgtgacttaagaagtctacgaggaaatgggcacgggaaccagaggataaagatcagtagacacatatttgaaatgatgtgtgtacaaggttatt

SEQ ID NO: 25249 - DNA, 122 bp, Homo sapiens
  misc_feature (61)..(62): /note="This region represents a CpG dinucleotide"
  misc_feature (61)..(61): /note="Nucleotide may be methylated to form 5-methylcytosine"
ctgactgaatcagaagctttgttaatacctctgttagagcatgtgttatgctgctgttcacgctggaagctgagctccttatagcgacacttgcagcatgttgatctctatattcccagcac

SEQ ID NO: 25250 - DNA, 122 bp, Homo sapiens
  misc_feature (61)..(62): /note="This region represents a CpG dinucleotide"
  misc_feature (61)..(61): /note="Nucleotide may be methylated to form 5-methylcytosine"
ctctttgaagagctcttttgtctttcaatgactctttcctgtttgagccacatcacccttcgttgtatgaaggcttaagtggcttccgtggtgagaatcttactctgtgtcataccctaatt

SEQ ID NO: 25251 - DNA, 122 bp, Homo sapiens
  misc_feature (61)..(62): /note="This region represents a CpG dinucleotide"
  misc_feature (61)..(61): /note="Nucleotide may be methylated to form 5-methylcytosine"
tgaagcttcggtcattagtcttccgcttcctaaagcaagaaactaaatgctgacttgtgtcgtttgccccagatgccaccggaaatgtcatcttctccccagacgctggcttgcaagcacag

SEQ ID NO: 25252 - DNA, 122 bp, Homo sapiens
  misc_feature (61)..(62): /note="This region represents a CpG dinucleotide"
  misc_feature (61)..(61): /note="Nucleotide may be methylated to form 5-methylcytosine"
ccaggttgacaacataacccaactaataccaacaacataaagtgcctgagttcaccagcccgctcagctcccagctgactgccccggagtcccgccctgttcaggcagaggcagagtttttt

SEQ ID NO: 25253 - DNA, 122 bp, Homo sapiens
  misc_feature (61)..(62): /note="This region represents a CpG dinucleotide"
  misc_feature (61)..(61): /note="Nucleotide may be methylated to form 5-methylcytosine"
tatctgagctgcttgtcagtttgttcgtctgtccctaggtctgtctgctatcagctatgccgctgcccgttgcgctgcagacccgcttggccaagagaggcatcctcaaacatctggagcct

SEQ ID NO: 25254 - DNA, 122 bp, Homo sapiens
  misc_feature (61)..(62): /note="This region represents a CpG dinucleotide"
  misc_feature (61)..(61): /note="Nucleotide may be methylated to form 5-methylcytosine"
gcagctgcctggatttggcctgtgggttgtagtttgccaacccttgctctaaatcattagcggagaaagaataacagcatgatgtattataaaagcagccaatccagatggctaaaaatatt

SEQ ID NO: 25255 - DNA, 122 bp, Homo sapiens
  misc_feature (61)..(62): /note="This region represents a CpG dinucleotide"
  misc_feature (61)..(61): /note="Nucleotide may be methylated to form 5-methylcytosine"
gttcatctgtcaacagtcgaagcgcactgctctggtgggggatgttggcggtgcaggaggcgcgggggcaggagagtgtggtaaatcttgtaccctctgctcagctgtgctgtgaacctaaa

SEQ ID NO: 25256 - DNA, 122 bp, Homo sapiens
  misc_feature (61)..(62): /note="This region represents a CpG dinucleotide"
  misc_feature (61)..(61): /note="Nucleotide may be methylated to form 5-methylcytosine"
agttactgagaaatccctgaggtcaaaaaggaagtgataacagtggtcatcggtgtcaaacgctaacaaaatgtcaagaaggataagaatgaattggagatggttgatttgggaacttggtg

SEQ ID NO: 25257 - DNA, 122 bp, Homo sapiens
  misc_feature (61)..(62): /note="This region represents a CpG dinucleotide"
  misc_feature (61)..(61): /note="Nucleotide may be methylated to form 5-methylcytosine"
caaagaaaggactctgcccaagtcacatgttctccttcacatgagagaaggaagcacagacgtgctggccatccctgagaacaggaagtgaaaggtgtaggaccagaaaagagaatgtgggg

SEQ ID NO: 25258 - DNA, 122 bp, Homo sapiens
  misc_feature (61)..(62): /note="This region represents a CpG dinucleotide"
  misc_feature (61)..(61): /note="Nucleotide may be methylated to form 5-methylcytosine"
attgttcttggcttttccaggtcaagccaagactgtcgagggggagccaaggtttcctggcgacatacccatgttcatccggtaccaccttacggcttcagtgagtgcagggatttccagaa

SEQ ID NO: 25259 - DNA, 122 bp, Homo sapiens
  misc_feature (61)..(62): /note="This region represents a CpG dinucleotide"
  misc_feature (61)..(61): /note="Nucleotide may be methylated to form 5-methylcytosine"
acacagaggaaactccccctcccagccctaccccaagcacatccttgcttctctcagtcacgccagttacaccaacaggggcagctctggggaggacatttggaaaatagtcaagagagggt

SEQ ID NO: 25260 - DNA, 122 bp, Homo sapiens
  misc_feature (61)..(62): /note="This region represents a CpG dinucleotide"
  misc_feature (61)..(61): /note="Nucleotide may be methylated to form 5-methylcytosine"
aattgtcaactccttctctttcctgcctcctcccctcttttgacatggcctctttggtggcgttgtagtgactaacaaacagtatagattttggagcagccagacagacctgaatttaattc

SEQ ID NO: 25261 - DNA, 122 bp, Homo sapiens
  misc_feature (61)..(62): /note="This region represents a CpG dinucleotide"
  misc_feature (61)..(61): /note="Nucleotide may be methylated to form 5-methylcytosine"
tgttgagtaataggaaaccattgaaggttttagagaatgaagggaaggttaatggatagccggagtaggcagagatagtgaattaggaagctattttagtcagcagaggaagagatgatagg

SEQ ID NO: 25262 - DNA, 122 bp, Homo sapiens
  misc_feature (61)..(62): /note="This region represents a CpG dinucleotide"
  misc_feature (61)..(61): /note="Nucleotide may be methylated to form 5-methylcytosine"
caggtggggtaacagatgtccagagattcaagcaagttgctcagagccacatggtagagccgtgactcagccagaaccaaatcctggtcttgcaacttctaaccaaggtcccttttgatcat

SEQ ID NO: 25263 - DNA, 122 bp, Homo sapiens
  misc_feature (61)..(62): /note="This region represents a CpG dinucleotide"
  misc_feature (61)..(61): /note="Nucleotide may be methylated to form 5-methylcytosine"
ggacaaatggcaaggagtgtgtttggggcaggggaggtggcacgtctgtgcctggcactgcgagttctggcaggtgacagcaaataggatagaaagatatgaatgtctaggatatgtaagaa

SEQ ID NO: 25264 - DNA, 122 bp, Homo sapiens
  misc_feature (61)..(62): /note="This region represents a CpG dinucleotide"
  misc_feature (61)..(61): /note="Nucleotide may be methylated to form 5-methylcytosine"
aacaaatgtgtaagctgtatgctaacacatacagtttaactggacaatcgcttactgaatcgtgtagtaagattgcagatggtatttagggaaggaaaagatcaacagataagtttgcctga

SEQ ID NO: 25265 - DNA, 122 bp, Homo sapiens
  misc_feature (61)..(62): /note="This region represents a CpG dinucleotide"
  misc_feature (61)..(61): /note="Nucleotide may be methylated to form 5-methylcytosine"
ataaaccataacatgaggaggcctgttttagactggctggggaaggctatgcagaggtgacgtttggcatgagagttgaagcattatgtaaacagagaccatgtacaaaggttttagggtag

SEQ ID NO: 25266 - DNA, 122 bp, Homo sapiens
  misc_feature (61)..(62): /note="This region represents a CpG dinucleotide"
  misc_feature (61)..(61): /note="Nucleotide may be methylated to form 5-methylcytosine"
taacaatgattaatcatccccactggacttaccctaaatccacagcagtaagaggagtaacggttgtgcctgcaattcaacaagcattcactggggcctgcttggcacactctcatttatgc

SEQ ID NO: 25267 - DNA, 122 bp, Homo sapiens
  misc_feature (61)..(62): /note="This region represents a CpG dinucleotide"
  misc_feature (61)..(61): /note="Nucleotide may be methylated to form 5-methylcytosine"
ttctggggtcccggtgctcacagcctgaggtggcactggctgggccatccctgcattgtacgcagcaggcaagctgttccttgtccctgcgttggtttggctgcccttggcctacctccatc

SEQ ID NO: 25268 - DNA, 122 bp, Homo sapiens
  misc_feature (61)..(62): /note="This region represents a CpG dinucleotide"
  misc_feature (61)..(61): /note="Nucleotide may be methylated to form 5-methylcytosine"
tggcctagagagtttctttcttgttggggttgttcaccggtgggaggtgcaccattgtgccgtgctgactatattcatagagttatgtaaccatcactctcatctaatttcagaacaaaagg

SEQ ID NO: 25269 - DNA, 122 bp, Homo sapiens
  misc_feature (61)..(62): /note="This region represents a CpG dinucleotide"
  misc_feature (61)..(61): /note="Nucleotide may be methylated to form 5-methylcytosine"
atggacatccaattcttttttaaaaaaatcaactttcattttagatatgggggatatatgcgcaggtttgtcccagaggtatagtgcacccaggtagtgagcataataaacaatagtttttc

SEQ ID NO: 25270 - DNA, 122 bp, Homo sapiens
  misc_feature (61)..(62): /note="This region represents a CpG dinucleotide"
  misc_feature (61)..(61): /note="Nucleotide may be methylated to form 5-methylcytosine"
agaatccatcattttaaaatgtcctgtgaatatgtgcatggattcagaaatgagcctgtacgcttggggatccgcctgccctggagcaggatcattctaaaaactgtccttttataactcag

SEQ ID NO: 25271 - DNA, 122 bp, Homo sapiens
  misc_feature (61)..(62): /note="This region represents a CpG dinucleotide"
  misc_feature (61)..(61): /note="Nucleotide may be methylated to form 5-methylcytosine"
accgaccttccctcatcctagctggttgcacaacccaattcacagtgcttgctctcattacgaaatggaattgagaagatgttacagcattcagcacgtaattatgtgcagagcacttgccc

SEQ ID NO: 25272 - DNA, 122 bp, Homo sapiens
  misc_feature (61)..(62): /note="This region represents a CpG dinucleotide"
  misc_feature (61)..(61): /note="Nucleotide may be methylated to form 5-methylcytosine"
actctttgattttttaaaaaaattttatagcatttcagtactaagagttttcaaaaacaacgttgtgtttacagaagaaacacatgacctgggatatgacagatgaagcagcaggtaagtag

SEQ ID NO: 25273 - DNA, 122 bp, Homo sapiens
  misc_feature (61)..(62): /note="This region represents a CpG dinucleotide"
  misc_feature (61)..(61): /note="Nucleotide may be methylated to form 5-methylcytosine"
aagcaacattcatcatgttcaccctaaggcttctggagcttgctggctggctgactggctcgccaggtacatttaagaagcctgtgcttggggatgtttcttaactgcagacggttccttta

SEQ ID NO: 25274 - DNA, 122 bp, Homo sapiens
  misc_feature (61)..(62): /note="This region represents a CpG dinucleotide"
  misc_feature (61)..(61): /note="Nucleotide may be methylated to form 5-methylcytosine"
tacatggttacatggatggatgataaatgaatggatgggtaggtagacggatggatggatcgatgggtagatgaataatagatggatagataaatgaaagcactccgaactgagaattagga

SEQ ID NO: 25275 - DNA, 122 bp, Homo sapiens
  misc_feature (61)..(62): /note="This region represents a CpG dinucleotide"
  misc_feature (61)..(61): /note="Nucleotide may be methylated to form 5-methylcytosine"
tcatggccactttagtttggggcaggccccagtggggatacaagctcttggtgcatctcccgtctgctgcactttgacagccactgtcccggcgcctttactgctcagtaaatggtgggtgt

SEQ ID NO: 25276 - DNA, 122 bp, Homo sapiens
  misc_feature (61)..(62): /note="This region represents a CpG dinucleotide"
  misc_feature (61)..(61): /note="Nucleotide may be methylated to form 5-methylcytosine"
attggtgtggatcaagtagccaggagaccatttacattgctgtttattttcattgcatagcgaagagccccaagcattcacactggaggagaaaagggccaagcttgataagcagtgtggga

SEQ ID NO: 25277 - DNA, 122 bp, Homo sapiens
  misc_feature (61)..(62): /note="This region represents a CpG dinucleotide"
  misc_feature (61)..(61): /note="Nucleotide may be methylated to form 5-methylcytosine"
actcaatggccaaatccaggtgtcccattatgagcttgttgaagaccagtgtctcagccacgtatgccacgatttcaatgccctcgcctttcagggggaggttgaagatgtgctccatggcc

SEQ ID NO: 25278 - DNA, 122 bp, Homo sapiens
  misc_feature (61)..(62): /note="This region represents a CpG dinucleotide"
  misc_feature (61)..(61): /note="Nucleotide may be methylated to form 5-methylcytosine"
acaggtccaaggtcacatagccagtcagaggcatttgtactgtaactcgggtctctgtttcgcttattgtagtaatttcccctttgcacagatgaagacatttagacatggaggacagtttt

SEQ ID NO: 25279 - DNA, 122 bp, Homo sapiens
  misc_feature (61)..(62): /note="This region represents a CpG dinucleotide"
  misc_feature (61)..(61): /note="Nucleotide may be methylated to form 5-methylcytosine"
tccaaaggctgggctgcaaaggttctcacatctctgattctctgatcaaatgtgttgtctcggctggggtgactcatgcttatactcctagagctttggaaggctgaggctggaggatcact

SEQ ID NO: 25280 - DNA, 122 bp, Homo sapiens
  misc_feature (61)..(62): /note="This region represents a CpG dinucleotide"
  misc_feature (61)..(61): /note="Nucleotide may be methylated to form 5-methylcytosine"
gtttttccacgtttcagtgaacttccttgaaactttgctgtggttgtcaccttcggccatcgtttcacaacagtgccctcagacagtgacagtcgcgaccttcctgattctcctgggggccc

SEQ ID NO: 25281 - DNA, 122 bp, Homo sapiens
  misc_feature (61)..(62): /note="This region represents a CpG dinucleotide"
  misc_feature (61)..(61): /note="Nucleotide may be methylated to form 5-methylcytosine"
tagcacaacacacagaatgtcttggttatttcacaactgccttataaatgctcgagtaaccgtcatgagaaactgactaccaggtgaaagggcagccatactctgaggagacactacagatt

SEQ ID NO: 25282 - DNA, 122 bp, Homo sapiens
  misc_feature (61)..(62): /note="This region represents a CpG dinucleotide"
  misc_feature (61)..(61): /note="Nucleotide may be methylated to form 5-methylcytosine"
gtcgggggactgataatgtttaactaagccatagtaactgaaattcatgcagctcggaaccgtgcaaagcaaggaacacacacacacacacacactctctctctctttctctcactcattgt

SEQ ID NO: 25283 - DNA, 122 bp, Homo sapiens
  misc_feature (61)..(62): /note="This region represents a CpG dinucleotide"
  misc_feature (61)..(61): /note="Nucleotide may be methylated to form 5-methylcytosine"
catttggcctcaacagcttgcaaagcaaagcatggcttgagcctaccacgggcagggacacggtcggcagcccatgttaatctgcatccatgagtagggaaaatgagtcattcagccaggag

SEQ ID NO: 25284 - DNA, 122 bp, Homo sapiens
  misc_feature (61)..(62): /note="This region represents a CpG dinucleotide"
  misc_feature (61)..(61): /note="Nucleotide may be methylated to form 5-methylcytosine"
aggattgagatagcgtgtgtgtttgcacgctcgcatgcagaaagatagagaaaaagagagcgcacataagtagttttgctttgaagtccctacataattactgttaagatctatcaaaatgt

SEQ ID NO: 25285 - DNA, 122 bp, Homo sapiens
  misc_feature (61)..(62): /note="This region represents a CpG dinucleotide"
  misc_feature (61)..(61): /note="Nucleotide may be methylated to form 5-methylcytosine"
cccctagaggggtccctgttttaggacagaaacaaaacccctgaatgacttccttactttcgaaaacagcctcccatcgaattctgtgaaggagctcagccactgattagaaataaaggttt

SEQ ID NO: 25286 - DNA, 122 bp, Homo sapiens
  misc_feature (61)..(62): /note="This region represents a CpG dinucleotide"
  misc_feature (61)..(61): /note="Nucleotide may be methylated to form 5-methylcytosine"
ctagcattagccatcattattggtaacccttgtttaggcagcctttctgcaagctaaccacgtttacttaaaatgattcttgcatgtaaggttacctaatatttttgatacagcattaatca

SEQ ID NO: 25287 - DNA, 122 bp, Homo sapiens
  misc_feature (61)..(62): /note="This region represents a CpG dinucleotide"
  misc_feature (61)..(61): /note="Nucleotide may be methylated to form 5-methylcytosine"
gctgggcaagcgtgggtggtgggcaggctgccatttccatgagaccagagctcgaggcttcgtcgtttagcctctgtccttccacacagtgcaggcagcaggcagtgaggacaggtccctgg

SEQ ID NO: 25288 - DNA, 122 bp, Homo sapiens
  misc_feature (61)..(62): /note="This region represents a CpG dinucleotide"
  misc_feature (61)..(61): /note="Nucleotide may be methylated to form 5-methylcytosine"
cttcttcctcatcttcttgcctttaagttgatcaaccaggttcaatatgtttgtggaagacgcaaagccggtttctgagtcaataatcagttccagctggaagaaagagcaggtatcatgct

SEQ ID NO: 25289 - DNA, 122 bp, Homo sapiens
  misc_feature (61)..(62): /note="This region represents a CpG dinucleotide"
  misc_feature (61)..(61): /note="Nucleotide may be methylated to form 5-methylcytosine"
tctcactttttccaaaggtctctcttaatcctttgatcattctctgtggaagctcccatgcgtgtttcttcttctttaatccttaactagattgtttgccattggctttgagtggaatccag

SEQ ID NO: 25290 - DNA, 122 bp, Homo sapiens
  misc_feature (61)..(62): /note="This region represents a CpG dinucleotide"
  misc_feature (61)..(61): /note="Nucleotide may be methylated to form 5-methylcytosine"
ctctgcctcccacccaggcagatcttcaggcattcagaggaactgttcacttggttcaaccgtctgagttatcctaccattcctgtgcagagatcctgatgcatgggctggggaggcggggg

SEQ ID NO: 25291 - DNA, 122 bp, Homo sapiens
  misc_feature (61)..(62): /note="This region represents a CpG dinucleotide"
  misc_feature (61)..(61): /note="Nucleotide may be methylated to form 5-methylcytosine"
acctagaagatacaacaattcaaaacatatatgcaccaaacatcagagctccacaatatacgaagcaaatgttgacagaaatgaagggagtaatagacaactctgcaatcaaatgcctgaat

SEQ ID NO: 25292 - DNA, 122 bp, Homo sapiens
  misc_feature (61)..(62): /note="This region represents a CpG dinucleotide"
  misc_feature (61)..(61): /note="Nucleotide may be methylated to form 5-methylcytosine"
ctgcctggactgtgctgtggcagtgagccagcttctcagccacgtggatgaggtgaacatcgcaggctggataactggattggaggagcttgagtcactgaatgatcttggggaactagctg

SEQ ID NO: 25293 - DNA, 122 bp, Homo sapiens
  misc_feature (61)..(62): /note="This region represents a CpG dinucleotide"
  misc_feature (61)..(61): /note="Nucleotide may be methylated to form 5-methylcytosine"
ctctcagtggccgtgtgggccaccactgttgctctgctactactggactgtcattgttttcgatcttggcctgggtcctgctgcaggctgccaggccaaccacttggcatgcatgtgcccct

SEQ ID NO: 25294 - DNA, 122 bp, Homo sapiens
  misc_feature (61)..(62): /note="This region represents a CpG dinucleotide"
  misc_feature (61)..(61): /note="Nucleotide may be methylated to form 5-methylcytosine"
aaatcatgtttgacaagtgggtattgtgtgctaatcttttctctactcttaaccattctgcgttcttagaatattgaatacggatttagattacatgtgacaaaatgcctgccacataatag

SEQ ID NO: 25295 - DNA, 122 bp, Homo sapiens
  misc_feature (61)..(62): /note="This region represents a CpG dinucleotide"
  misc_feature (61)..(61): /note="Nucleotide may be methylated to form 5-methylcytosine"
tcctgctccattgatgagccaatgaccttgctatcaactcagaagttgatcctgtcacctcgctcttacctcacctacaaaatgcactcagtcactaaggcctgctaatccaacctcttaaa

SEQ ID NO: 25296 - DNA, 122 bp, Homo sapiens
  misc_feature (61)..(62): /note="This region represents a CpG dinucleotide"
  misc_feature (61)..(61): /note="Nucleotide may be methylated to form 5-methylcytosine"
ggctcagagaggtgaaatgaccccaaggcacaggctccaaggtaggctttgagcctctgacgtatgacttggacaacaccctcaaccttgctttgtgttttccgtgagtctaaggaggggtt

SEQ ID NO: 25297 - DNA, 122 bp, Homo sapiens
  misc_feature (61)..(62): /note="This region represents a CpG dinucleotide"
  misc_feature (61)..(61): /note="Nucleotide may be methylated to form 5-methylcytosine"
tccgcaggggcttcctacctgtgtgagaggtcgtagcgggagacagcaacagagagtaggcggctgggccacgtccttcacagggcgtcatgtgcctttctattttcatcttagaaaatttc

SEQ ID NO: 25298 - DNA, 122 bp, Homo sapiens
  misc_feature (61)..(62): /note="This region represents a CpG dinucleotide"
  misc_feature (61)..(61): /note="Nucleotide may be methylated to form 5-methylcytosine"
ggcctcccaaagtactgggattataggcgtgagtcgccgcgcccagccacatcttctttacgtagctattacactgttaagcaaatggtagacactcaatacatatttgtcacaggtgaatt

SEQ ID NO: 25299 - DNA, 122 bp, Homo sapiens
  misc_feature (61)..(62): /note="This region represents a CpG dinucleotide"
  misc_feature (61)..(61): /note="Nucleotide may be methylated to form 5-methylcytosine"
tactcaccacatctgtcagatcagattcaacttcagaatgaagagaatcccagacaagcccggtcgtttctttgcaatgttcttcatggtcgaggtcatccagctctgtcttctagggaata

SEQ ID NO: 25300 - DNA, 122 bp, Homo sapiens
  misc_feature (61)..(62): /note="This region represents a CpG dinucleotide"
  misc_feature (61)..(61): /note="Nucleotide may be methylated to form 5-methylcytosine"
agtgtgtggtttgggagttctgtgaagtgtttgcagtcgctactaataatccaggtgacacggcaaacattgcagttcctaggtccagcacaattagaggagggttcactcgtaggcagcat

SEQ ID NO: 25301 - DNA, 122 bp, Homo sapiens
  misc_feature (61)..(62): /note="This region represents a CpG dinucleotide"
  misc_feature (61)..(61): /note="Nucleotide may be methylated to form 5-methylcytosine"
aagtccaaacaagctttgcaagtccaggtctctcacaagttcatagtaatctcttcctggcgagagccacaaagcaatgggtgataccagaatggtgcttaccattcttaagtggagaaaat

SEQ ID NO: 25302 - DNA, 122 bp, Homo sapiens
  misc_feature (61)..(62): /note="This region represents a CpG dinucleotide"
  misc_feature (61)..(61): /note="Nucleotide may be methylated to form 5-methylcytosine"
agcttgatgtttctgacttggctaatggagtgagagggcacgggttctgtctgcgggtaacgcaaatcagtgccgccaccatcattcagtgggtgtcagagctggccagtgcagtccccgaa

SEQ ID NO: 25303 - DNA, 122 bp, Homo sapiens
  misc_feature (61)..(62): /note="This region represents a CpG dinucleotide"
  misc_feature (61)..(61): /note="Nucleotide may be methylated to form 5-methylcytosine"
gggatcttatttacatgattctagtgttaaccattgggttctatcatgggcagcagctgtcgggtatgttgggttttttttttttttttttttttttttttttcagtgattaaaatgaggaa

SEQ ID NO: 25304 - DNA, 122 bp, Homo sapiens
  misc_feature (61)..(62): /note="This region represents a CpG dinucleotide"
  misc_feature (61)..(61): /note="Nucleotide may be methylated to form 5-methylcytosine"
taccagatcaacctctgccaagtatcgatggcatgggcagccccacgtgtctgccctctccgtcctatacccactactgagctgctgtgcagctggcagaaggcgcacacgtttgctgaaat

SEQ ID NO: 25305 - DNA, 122 bp, Homo sapiens
  misc_feature (61)..(62): /note="This region represents a CpG dinucleotide"
  misc_feature (61)..(61): /note="Nucleotide may be methylated to form 5-methylcytosine"
tattgtgcgcgagttgatagtgtgcacgagttgataatgcgtgcgagttgatagtgtgtgcgaattgatagggtgcatgagtcaggctactctgattactggctttgcctgcactgcctgtt

SEQ ID NO: 25306 - DNA, 122 bp, Homo sapiens
  misc_feature (61)..(62): /note="This region represents a CpG dinucleotide"
  misc_feature (61)..(61): /note="Nucleotide may be methylated to form 5-methylcytosine"
tctgccttaaggggtgggttgatgggtgtctggaatgcagtagcactgtgtaactgtctgcgttatcatcacaggttccccaacctctgtgccatgaggcatttatcttcctgaattcactc

SEQ ID NO: 25307 - DNA, 122 bp, Homo sapiens
  misc_feature (61)..(62): /note="This region represents a CpG dinucleotide"
  misc_feature (61)..(61): /note="Nucleotide may be methylated to form 5-methylcytosine"
taatagaaaaatgagaaaaggaaatggaacaggaagttcccagaaaaggaaataaataagcggccgataaacaaatgaagaaatagtctgttattaaatgaaagtaaatcagaccgagtgcg

SEQ ID NO: 25308 - DNA, 122 bp, Homo sapiens
  misc_feature (61)..(62): /note="This region represents a CpG dinucleotide"
  misc_feature (61)..(61): /note="Nucleotide may be methylated to form 5-methylcytosine"
acctacatttgtatctccacttggatgtgtaatacctcaacatgactaaaactgagctaccgacctaacccctaaaacctgcatctcctgtagtcttctcagctcaagaaatggggcaacat

SEQ ID NO: 25309 - DNA, 122 bp, Homo sapiens
  misc_feature (61)..(62): /note="This region represents a CpG dinucleotide"
  misc_feature (61)..(61): /note="Nucleotide may be methylated to form 5-methylcytosine"
tgctatggtactcagttacgtaattaaacagtaatctaggtgttgccgggaaggctatttcgcagatgtggttgacatctatcataagttggcttcaagtaaaggagattaccctcaaaatt

SEQ ID NO: 25310 - DNA, 122 bp, Homo sapiens
  misc_feature (61)..(62): /note="This region represents a CpG dinucleotide"
  misc_feature (61)..(61): /note="Nucleotide may be methylated to form 5-methylcytosine"
gtagatcctagagagaaggtctagtgtggtgattaatggtgactttccagagctcagccacgtgggtttcattctcagtgctgccacctgccagctccaatgtgactatgaacatgtcactt

SEQ ID NO: 25311 - DNA, 122 bp, Homo sapiens
  misc_feature (61)..(62): /note="This region represents a CpG dinucleotide"
  misc_feature (61)..(61): /note="Nucleotide may be methylated to form 5-methylcytosine"
tgtaaggcttggggggcagcgagtgggcatcgtggtgaaagcctcgggatcagggagctgcgtctgcaggcaggcctgctggccggaaacctgccaggaaaggaaggggctgtcccggggcg

SEQ ID NO: 25312 - DNA, 122 bp, Homo sapiens
  misc_feature (61)..(62): /note="This region represents a CpG dinucleotide"
  misc_feature (61)..(61): /note="Nucleotide may be methylated to form 5-methylcytosine"
ataaattagaggaagcaatttcggaacaacggaaccttcaaactataaatactgaattatcgaacacttgccaggcacttcagcagaagacaaggaaactgaagagtgagtagcaaatattc

SEQ ID NO: 25313 - DNA, 122 bp, Homo sapiens
  misc_feature (61)..(62): /note="This region represents a CpG dinucleotide"
  misc_feature (61)..(61): /note="Nucleotide may be methylated to form 5-methylcytosine"
agacttctggggctttatgtggcctctccctccccaggtctgaggagagcctctgggtgtcgacctggcttcctggtgagtgcccagccacccagccctggcttgtaggagggggactcttg

SEQ ID NO: 25314 - DNA, 122 bp, Homo sapiens
  misc_feature (61)..(62): /note="This region represents a CpG dinucleotide"
  misc_feature (61)..(61): /note="Nucleotide may be methylated to form 5-methylcytosine"
ttaaacaaacaaacaaaagatctgggtgaagaatataccaggcagaggaaacagctagtacgaagaacatagcctggaaatggatttaatgtggtcaaataatagaaagccagtgtgtctat

SEQ ID NO: 25315 - DNA, 122 bp, Homo sapiens
  misc_feature (61)..(62): /note="This region represents a CpG dinucleotide"
  misc_feature (61)..(61): /note="Nucleotide may be methylated to form 5-methylcytosine"
ctgaagaagcctgttttactaccttgtccaccagggctgcaggtagatgtccatgggccccgcccgcagtcttgaccacctgggtctcttgtcctcaaatgatggacatgtccacctccacc

SEQ ID NO: 25316 - DNA, 122 bp, Homo sapiens
  misc_feature (61)..(62): /note="This region represents a CpG dinucleotide"
  misc_feature (61)..(61): /note="Nucleotide may be methylated to form 5-methylcytosine"
aaatggtccaaaggaattcaaagtcatatcttttatctgagggataagaaaaagagaatgcggacgttgttccttgtgaccacagccaccacccccatcaacttgccaagcacagagtaaat

SEQ ID NO: 25317 - DNA, 122 bp, Homo sapiens
  misc_feature (61)..(62): /note="This region represents a CpG dinucleotide"
  misc_feature (61)..(61): /note="Nucleotide may be methylated to form 5-methylcytosine"
tggttagataaccttgggttcaaagacagacatttcctgttgtcacagtctttacataaacgctcataccatacttacgattagttgtttatgtgggttaaattaaccatggaatcactcct

SEQ ID NO: 25318 - DNA, 122 bp, Homo sapiens
  misc_feature (61)..(62): /note="This region represents a CpG dinucleotide"
  misc_feature (61)..(61): /note="Nucleotide may be methylated to form 5-methylcytosine"
gtcatgtgggattaactggactcaactgtccagcataccttaggtatgaacatgaaggtgcgcaagatcatgcccaaaggttcactagtagtagatggcttataaaatacctgctcataggc

SEQ ID NO: 25319 - DNA, 122 bp, Homo sapiens
  misc_feature (61)..(62): /note="This region represents a CpG dinucleotide"
  misc_feature (61)..(61): /note="Nucleotide may be methylated to form 5-methylcytosine"
ctgcttcttttcctgtatttcccatcttggtgagtcaccagcaccaaagcctgttgttctcgcacataaacaggtcttgaacccatctccccctctttatggtccttgcttgagtacaggtc

SEQ ID NO: 25320 - DNA, 122 bp, Homo sapiens
  misc_feature (61)..(62): /note="This region represents a CpG dinucleotide"
  misc_feature (61)..(61): /note="Nucleotide may be methylated to form 5-methylcytosine"
gtagtcctgatctctgctagtgagtcaagcacactgcatctgaacataagtcatgcagggcgtgacaattgcctcttattactcagcacccctgccagcttgaacccatgctcaggcggggg

SEQ ID NO: 25321 - DNA, 122 bp, Homo sapiens
  misc_feature (61)..(62): /note="This region represents a CpG dinucleotide"
  misc_feature (61)..(61): /note="Nucleotide may be methylated to form 5-methylcytosine"
taagcttagaaaccattggtatgtggtgacagcagtttacctggtgatttcctctaggcacgcttactaatctgcttacaggaatggagaaagaatgattggactgattcaaggccggaggt

SEQ ID NO: 25322 - DNA, 122 bp, Homo sapiens
  misc_feature (61)..(62): /note="This region represents a CpG dinucleotide"
  misc_feature (61)..(61): /note="Nucleotide may be methylated to form 5-methylcytosine"
ggcaggagccagatgtcatttgtgtctgtatctcagctctttgtatgatgttaggcccatcgtacttgctgagtaaatgtttgctatgtgccttgactcttacctgattactcaccatgcat

SEQ ID NO: 25323 - DNA, 122 bp, Homo sapiens
  misc_feature (61)..(62): /note="This region represents a CpG dinucleotide"
  misc_feature (61)..(61): /note="Nucleotide may be methylated to form 5-methylcytosine"
aaaagaagggaaatgaggatttcaggtgcaggattgcagtctctcaactttttatgacaacgcataaagagaataatataaaagatcaatatgttgggagacaattctttataggctgtttg

SEQ ID NO: 25324 - DNA, 122 bp, Homo sapiens
  misc_feature (61)..(62): /note="This region represents a CpG dinucleotide"
  misc_feature (61)..(61): /note="Nucleotide may be methylated to form 5-methylcytosine"
aaccttcagagagagcacggccctgccaacacctggattgagaacttgtggcccccaggacggtgagaatatatctgtattttgaagccatgaaggttatggcaatttgccacagcagccac

SEQ ID NO: 25325 - DNA, 122 bp, Homo sapiens
  misc_feature (61)..(62): /note="This region represents a CpG dinucleotide"
  misc_feature (61)..(61): /note="Nucleotide may be methylated to form 5-methylcytosine"
gttttgggcaaacagggtgacttgacaggtgcagcatgtgctctgtacatacagtggtggcgagggttaagagtggcctccacacagcatcaggtttagtcatgtaagatgtgcttccagga

SEQ ID NO: 25326 - DNA, 122 bp, Homo sapiens
  misc_feature (61)..(62): /note="This region represents a CpG dinucleotide"
  misc_feature (61)..(61): /note="Nucleotide may be methylated to form 5-methylcytosine"
ctcttgtcaccacagagtgctcaccagagtttatcctaagcctaactactgcagattacacgttcatgtggggtttgctaacacattgttctaattcatctgaaatgattgggttttctcaa

SEQ ID NO: 25327 - DNA, 122 bp, Homo sapiens
  misc_feature (61)..(62): /note="This region represents a CpG dinucleotide"
  misc_feature (61)..(61): /note="Nucleotide may be methylated to form 5-methylcytosine"
ccaggtcatcgcccagcccatctaactggcctctccttttgtcatttctttccatggcagcgtttattactttcctgcttaaaactagtggcttcccctgctgcaggatcaaatccaaatcc

SEQ ID NO: 25328 - DNA, 122 bp, Homo sapiens
  misc_feature (61)..(62): /note="This region represents a CpG dinucleotide"
  misc_feature (61)..(61): /note="Nucleotide may be methylated to form 5-methylcytosine"
tacagtgtgttgtcgtattcacactaacaccactgagaagttgatcctgttattattattcgcagcgacatttcctggcttagacctagcgtactgggtaatgcccatatgttcagaacagt

SEQ ID NO: 25329 - DNA, 122 bp, Homo sapiens
  misc_feature (61)..(62): /note="This region represents a CpG dinucleotide"
  misc_feature (61)..(61): /note="Nucleotide may be methylated to form 5-methylcytosine"
gtctttgagattatcagccttatccttggtaggctagccaggcacagaactcaataggaacgagagacttccacctgaccacagaggtgagaatcacctttcccttcaccccccattgtcat

SEQ ID NO: 25330 - DNA, 122 bp, Homo sapiens
  misc_feature (61)..(62): /note="This region represents a CpG dinucleotide"
  misc_feature (61)..(61): /note="Nucleotide may be methylated to form 5-methylcytosine"
gtttttgctttccagatgctcgggagccattctgcaggcaagcagacctatttgcagggacgggcaattgttgctgtggtgcaatgaagcaagtggggctgggaaagaatccttaagaagat

SEQ ID NO: 25331 - DNA, 122 bp, Homo sapiens
  misc_feature (61)..(62): /note="This region represents a CpG dinucleotide"
  misc_feature (61)..(61): /note="Nucleotide may be methylated to form 5-methylcytosine"
gccctcacttctctggttgtttcatttgttcatacatccatctacctgacctagagacaacgtcagatgatataggaaaagacttctatctaaaaagaactcagttctacgtgagaattctg

SEQ ID NO: 25332 - DNA, 122 bp, Homo sapiens
  misc_feature (61)..(62): /note="This region represents a CpG dinucleotide"
  misc_feature (61)..(61): /note="Nucleotide may be methylated to form 5-methylcytosine"
cccacctgccagcaggtcaaaggttattgcctatgactggccaggtttcacttcggctgccgtggtgctcctgatgtgactgcactgggcagacggacctgaagtactgtccctgtattaag

SEQ ID NO: 25333 - DNA, 122 bp, Homo sapiens
  misc_feature (61)..(62): /note="This region represents a CpG dinucleotide"
  misc_feature (61)..(61): /note="Nucleotide may be methylated to form 5-methylcytosine"
agtcagatggccacatccaactgtatgagaggatgaaaatatgcctagctaaagattctacgtaggagagggagaacagatgttagaaaacaataatcagttttttgcaaattggatgtcaa

SEQ ID NO: 25334 - DNA, 122 bp, Homo sapiens
  misc_feature (61)..(62): /note="This region represents a CpG dinucleotide"
  misc_feature (61)..(61): /note="Nucleotide may be methylated to form 5-methylcytosine"
gtggcctcatgcataccaatggtttttgtcatttatggctgggcaagatttatgactcggcgccccaaagctgtaaacagagcacaaaacagcaaacacttgctccttatggcatattgcag

SEQ ID NO: 25335 - DNA, 122 bp, Homo sapiens
  misc_feature (61)..(62): /note="This region represents a CpG dinucleotide"
  misc_feature (61)..(61): /note="Nucleotide may be methylated to form 5-methylcytosine"
gattttcctcccctccactccacccccaaattctggaggaatcaggcaagccatctaaaccgaaactatggcaatgactcagtccttgaaatacaaagacaaggaaggggcttagtcacaag

SEQ ID NO: 25336 - DNA, 122 bp, Homo sapiens
  misc_feature (61)..(62): /note="This region represents a CpG dinucleotide"
  misc_feature (61)..(61): /note="Nucleotide may be methylated to form 5-methylcytosine"
agaaaacacagcagaagtgggcttgaaaaaggaaggaaattaagaactttgtgttaaatacgacaagtttgagatttacgtaagtcagacatcttggtgaagataatcgggtacaaagctgg

SEQ ID NO: 25337 - DNA, 122 bp, Homo sapiens
  misc_feature (61)..(62): /note="This region represents a CpG dinucleotide"
  misc_feature (61)..(61): /note="Nucleotide may be methylated to form 5-methylcytosine"
cagtgtgcttcctgcacccagcgccagcccgccctggggaggggctgaacccgccctgctcgtgataaggcacaagcaagggctgccctgaaggaagctccaaagagaaaggagggcaggaa

SEQ ID NO: 25338 - DNA, 122 bp, Homo sapiens
  misc_feature (61)..(62): /note="This region represents a CpG dinucleotide"
  misc_feature (61)..(61): /note="Nucleotide may be methylated to form 5-methylcytosine"
aacaaggcctctggttccattggctcacttcctttttccccatagcctctggcataaaaacgcaaaccagagagacactttagaattcacttgtgcagtgctttttctgtcaatcagctgct

SEQ ID NO: 25339 - DNA, 122 bp, Homo sapiens
  misc_feature (61)..(62): /note="This region represents a CpG dinucleotide"
  misc_feature (61)..(61): /note="Nucleotide may be methylated to form 5-methylcytosine"
tatacatacttagttaatctatccaattatgttgagacacagtccgtaatgtcatcagcccgttgcgctaagggcagcggagtggagatattctgggacatacccaaggtcaatgttgagtc

SEQ ID NO: 25340 - DNA, 122 bp, Homo sapiens
  misc_feature (61)..(62): /note="This region represents a CpG dinucleotide"
  misc_feature (61)..(61): /note="Nucleotide may be methylated to form 5-methylcytosine"
agtcctggtcttcaagtcatagcagcctagaagcctcaggatgattccagccccacctgtcgagtcacctaagcctttgagtcttcccagctgaggtcccggatatcatgcagcagaggcat

SEQ ID NO: 25341 - DNA, 122 bp, Homo sapiens
  misc_feature (61)..(62): /note="This region represents a CpG dinucleotide"
  misc_feature (61)..(61): /note="Nucleotide may be methylated to form 5-methylcytosine"
tcgctcgcgagcccgtgcgtgcagcagccagagcctgtgaacttcgtggaatgctgtcgacgtgcggatcatcatctttacgttgctattaaaacagctcctggcactacaaagtagctgcg

SEQ ID NO: 25342 - DNA, 122 bp, Homo sapiens
  misc_feature (61)..(62): /note="This region represents a CpG dinucleotide"
  misc_feature (61)..(61): /note="Nucleotide may be methylated to form 5-methylcytosine"
cagctcaactgactaagccagttaggaatctacaccccaggggtgattaattaacattcacgcagaagggtcacacctcaggacacctgctgctagctcttctgttttccatatcactgacc

SEQ ID NO: 25343 - DNA, 122 bp, Homo sapiens
  misc_feature (61)..(62): /note="This region represents a CpG dinucleotide"
  misc_feature (61)..(61): /note="Nucleotide may be methylated to form 5-methylcytosine"
aggagaagactcagtcccttagtgaggccctttgctgctgactgggcgattaagtctgagcgttggagaattctaatgcaggaactgagtttgaggaagggcagacagctatgatcttggag

SEQ ID NO: 25344 - DNA, 122 bp, Homo sapiens
  misc_feature (61)..(62): /note="This region represents a CpG dinucleotide"
  misc_feature (61)..(61): /note="Nucleotide may be methylated to form 5-methylcytosine"
accagatgaccactaatgatgaaagtttctcaagggttctgaacacacaacatccaatggcgtttctgctgcttgaacagcttagcaggacatgtcagtccttcattgccccttctcacact

SEQ ID NO: 25345 - DNA, 122 bp, Homo sapiens
  misc_feature (61)..(62): /note="This region represents a CpG dinucleotide"
  misc_feature (61)..(61): /note="Nucleotide may be methylated to form 5-methylcytosine"
agtttatgaactcggtgcagtgagacctctagactgacacgtacaacagagatgcagtttcgtctaactggcacctgtcccttccattacttgctgggcctgcttctgtcccatgcagcact

SEQ ID NO: 25346 - DNA, 122 bp, Homo sapiens
  misc_feature (61)..(62): /note="This region represents a CpG dinucleotide"
  misc_feature (61)..(61): /note="Nucleotide may be methylated to form 5-methylcytosine"
ccactgaagttaaaaatccttcactgtctcatgaaacagtctttgtggcccctttgtgtgcgttgatgactcacagaggcactcgtggtctttgtattcggaggtaaggccgtcctgtggtc

SEQ ID NO: 25347 - DNA, 122 bp, Homo sapiens
  misc_feature (61)..(62): /note="This region represents a CpG dinucleotide"
  misc_feature (61)..(61): /note="Nucleotide may be methylated to form 5-methylcytosine"
gtaataacatttccctaacctgtggaaagaaagaaaaatattgagccattacaggattgtcgtcaggatcaaatgagatgatacatgtgaaatctctgtgtaaggtttaaaggattgcacaa

SEQ ID NO: 25348 - DNA, 122 bp, Homo sapiens
  misc_feature (61)..(62): /note="This region represents a CpG dinucleotide"
  misc_feature (61)..(61): /note="Nucleotide may be methylated to form 5-methylcytosine"
cctgcaccagggcagcaagaccagtttcttttacaaaatgttatgagtcagctccctgcccgtcctcaggacagcaaattgagctccctcatctgccgtgcaagaagggcctttcggaaatg

SEQ ID NO: 25349 - DNA, 122 bp, Homo sapiens
  misc_feature (61)..(62): /note="This region represents a CpG dinucleotide"
  misc_feature (61)..(61): /note="Nucleotide may be methylated to form 5-methylcytosine"
agtggtgagccagacagacaacattcctatgctagtttctcctactagggacaggctgaccgcaaacaaatgaacaatggccacagattgagctaaatgacatgaaggcagtaaacagggtg

SEQ ID NO: 25350 - DNA, 122 bp, Homo sapiens
  misc_feature (61)..(62): /note="This region represents a CpG dinucleotide"
  misc_feature (61)..(61): /note="Nucleotide may be methylated to form 5-methylcytosine"
cacctgcagaatccattaaggcctggaggcctaaggagttagtattgtatgaaatccctacgaaacccggtgaaaagaaaggtaagtagaataagtaagaaggccttttctttcacatatgt

SEQ ID NO: 25351 - DNA, 122 bp, Homo sapiens
  misc_feature (61)..(62): /note="This region represents a CpG dinucleotide"
  misc_feature (61)..(61): /note="Nucleotide may be methylated to form 5-methylcytosine"
ccagatttgctctttccctttgcaattgattttaattgtgttgtcaggtaacattagacacgaatgagaaaccgatcttcaaagacaggataggcctgaagaggcagtagtgtaaggaagtg

SEQ ID NO: 25352 - DNA, 122 bp, Homo sapiens
  misc_feature (61)..(62): /note="This region represents a CpG dinucleotide"
  misc_feature (61)..(61): /note="Nucleotide may be methylated to form 5-methylcytosine"
tctaggacaccactagccatgagaattctcaggttttatcccagtcttagatcagtgtcacgtttactacctaatgtgaaagagactgggaaacattgtgtcctttgtagttaagaatgtta

SEQ ID NO: 25353 - DNA, 122 bp, Homo sapiens
  misc_feature (61)..(62): /note="This region represents a CpG dinucleotide"
  misc_feature (61)..(61): /note="Nucleotide may be methylated to form 5-methylcytosine"
gaaatcatgtgtggtagatagtttgcataactttgggattttccagagagaggatgaaaacggtggccctccttgtaatgtctaggcacatgggacatccagtggaactgttgagggaggag

SEQ ID NO: 25354 - DNA, 122 bp, Homo sapiens
  misc_feature (61)..(62): /note="This region represents a CpG dinucleotide"
  misc_feature (61)..(61): /note="Nucleotide may be methylated to form 5-methylcytosine"
cacctcaacagttatcaccctagtctaagttatcatttctttcctggattgcagcaacagcgctctaattgaccttcctgcttctagccttaccactttttacttattctctgccagccacc

SEQ ID NO: 25355 - DNA, 122 bp, Homo sapiens
  misc_feature (61)..(62): /note="This region represents a CpG dinucleotide"
  misc_feature (61)..(61): /note="Nucleotide may be methylated to form 5-methylcytosine"
tggacagaaggctgtgactaactttattggcatctctctagagacataagtaggcttcaccgccaatttgcctaaggtgttcagcaggactattgaaggcctggcagctgccggaggagagc

SEQ ID NO: 25356 - DNA, 122 bp, Homo sapiens
  misc_feature (61)..(62): /note="This region represents a CpG dinucleotide"
  misc_feature (61)..(61): /note="Nucleotide may be methylated to form 5-methylcytosine"
accattcatccgcccattgggatagcccaggctctgagctcagcactccacccgtcactgcgattgcactaatcctcacccacccttgcaggcaggtattactgtgggcacagagaagtttg

SEQ ID NO: 25357 - DNA, 122 bp, Homo sapiens
  misc_feature (61)..(62): /note="This region represents a CpG dinucleotide"
  misc_feature (61)..(61): /note="Nucleotide may be methylated to form 5-methylcytosine"
gatttggtttcactctctgctgtatccttgcacctagcacagtgctcagcagccagtaggcgctgaataattgttgaaggacgacaggtgtgcagtgactgtgtgctgggcatggcagatgc

SEQ ID NO: 25358 - DNA, 122 bp, Homo sapiens
  misc_feature (61)..(62): /note="This region represents a CpG dinucleotide"
  misc_feature (61)..(61): /note="Nucleotide may be methylated to form 5-methylcytosine"
ttgagcaagaatagtgtcagggaatctgtgccctacctcaattcaacaaaaatgagtagtcgtgcagctcaacaagcatttattacattagtatgactaaatgtatatgatgtaacaaacta

SEQ ID NO: 25359 - DNA, 122 bp, Homo sapiens
  misc_feature (61)..(62): /note="This region represents a CpG dinucleotide"
  misc_feature (61)..(61): /note="Nucleotide may be methylated to form 5-methylcytosine"
ctctctgaaccatctgatcagtaactcctcctgttcacattacttcctgttgtgacctcacgcttcttcagactaatttaagactgtggttctccagaggcttcagctattctccacagaga

SEQ ID NO: 25360 - DNA, 122 bp, Homo sapiens
  misc_feature (61)..(62): /note="This region represents a CpG dinucleotide"
  misc_feature (61)..(61): /note="Nucleotide may be methylated to form 5-methylcytosine"
ttaaaataagaaagacctgtttgcccagcagtgagtaagcggctatccagcaggagtcagcggaggtgaggttggtaaggttggctagtgctggatcgtcatgggattggatgctggcttga

SEQ ID NO: 25361 - DNA, 122 bp, Homo sapiens
  misc_feature (61)..(62): /note="This region represents a CpG dinucleotide"
  misc_feature (61)..(61): /note="Nucleotide may be methylated to form 5-methylcytosine"
tcttgaacttctgcttagtgaattgaatctctttgcttgtaccctctgcacacactttatcgtcatttccttaccccagatgaatcatttaccacttacttccccatgttctatctcttcta

SEQ ID NO: 25362 - DNA, 122 bp, Homo sapiens
  misc_feature (61)..(62): /note="This region represents a CpG dinucleotide"
  misc_feature (61)..(61): /note="Nucleotide may be methylated to form 5-methylcytosine"
ttcattgctaagttctaaagccgtcatgactggatcttcactagacaatgacaggtaagccggacttgccaggcctttataggcattaatcctagatctggagtggctaaacgagtcatgct

SEQ ID NO: 25363 - DNA, 122 bp, Homo sapiens
  misc_feature (61)..(62): /note="This region represents a CpG dinucleotide"
  misc_feature (61)..(61): /note="Nucleotide may be methylated to form 5-methylcytosine"
taaacttagcacttctaagagactgagcttcatttccacatatcatacatgtaccttcagcgctggaaaattgtgtgtgcaaagctctgtttttattttaaattaggcttcctgtacatatt

SEQ ID NO: 25364 - DNA, 122 bp, Homo sapiens
  misc_feature (61)..(62): /note="This region represents a CpG dinucleotide"
  misc_feature (61)..(61): /note="Nucleotide may be methylated to form 5-methylcytosine"
acaattacctgtgataagagccatgtgtgagagttccacctgagtggagactaaatggcacgctgctggagtactgagcagagaggaatcacatgactgtgagctcagatcatttctgggta

SEQ ID NO: 25365 - DNA, 122 bp, Homo sapiens
  misc_feature (61)..(62): /note="This region represents a CpG dinucleotide"
  misc_feature (61)..(61): /note="Nucleotide may be methylated to form 5-methylcytosine"
caaattccatttccagagcactttacctttcccatctactaaatcagttacaataaagcacgtcttaaatccatatactcctgctggaaatctcaacccaagccatcaatgcctgttcgggt

SEQ ID NO: 25366 - DNA, 122 bp, Homo sapiens
  misc_feature (61)..(62): /note="This region represents a CpG dinucleotide"
  misc_feature (61)..(61): /note="Nucleotide may be methylated to form 5-methylcytosine"
actggaacacaccggtctggtaggaagaagagggattcccagacctacagggtgcgtcggcgataacccgacccaccaaagcccgaggtgctgccagtgcttccggccctgcgctgggtcag

SEQ ID NO: 25367 - DNA, 122 bp, Homo sapiens
  misc_feature (61)..(62): /note="This region represents a CpG dinucleotide"
  misc_feature (61)..(61): /note="Nucleotide may be methylated to form 5-methylcytosine"
gattcagggccagaacaaagggcagccattgacagctgcacattttatgcaaatcttgaacggtttcatccagggaacaaaacccttgtgaaaatggtggaaaagggccctttcccttttag

SEQ ID NO: 25368 - DNA, 122 bp, Homo sapiens
  misc_feature (61)..(62): /note="This region represents a CpG dinucleotide"
  misc_feature (61)..(61): /note="Nucleotide may be methylated to form 5-methylcytosine"
aattgaaataatgttattaacttaatgactttatttttcctaaataaagacctctgtggccgggcgaggtggctcatgcctgtaggaggcggaggtgggcagatcacttgaggccaggagtt

SEQ ID NO: 25369 - DNA, 122 bp, Homo sapiens
  misc_feature (61)..(62): /note="This region represents a CpG dinucleotide"
  misc_feature (61)..(61): /note="Nucleotide may be methylated to form 5-methylcytosine"
tgggctttatttacatcatcatctaatcaatccatataaaaagtcaaatcaccagctgggcgcagtggctcactcttgtaatcccagcactttgggaggccaaggcaggtggatcacctgag

SEQ ID NO: 25370 - DNA, 122 bp, Homo sapiens
  misc_feature (61)..(62): /note="This region represents a CpG dinucleotide"
  misc_feature (61)..(61): /note="Nucleotide may be methylated to form 5-methylcytosine"
tttgtgtttcacttcctgtgcagatggtgggggaagtggggagaagtcccaagaactgtgcgacactgcagctattgcttgaaactgccaaaatttggaaaggcacattctatttgcattac

SEQ ID NO: 25371 - DNA, 122 bp, Homo sapiens
  misc_feature (61)..(62): /note="This region represents a CpG dinucleotide"
  misc_feature (61)..(61): /note="Nucleotide may be methylated to form 5-methylcytosine"
ttatttgtttattttgtaacttacactttcctcccactcctgatgttaaacatgcagcttcgcccaagtgtgaacttcagagagtattccatcagttactctccctctgtggtctgcacaat

SEQ ID NO: 25372 - DNA, 122 bp, Homo sapiens
  misc_feature (61)..(62): /note="This region represents a CpG dinucleotide"
  misc_feature (61)..(61): /note="Nucleotide may be methylated to form 5-methylcytosine"
ttgttatttagatagtaagtaaactcttctgttctgctgaataataccttggctactctacgctattaaaccacaaagcttcatttagtaattcaagaccaaaatgcaatagtaaagcattc

SEQ ID NO: 25373 - DNA, 122 bp, Homo sapiens
  misc_feature (61)..(62): /note="This region represents a CpG dinucleotide"
  misc_feature (61)..(61): /note="Nucleotide may be methylated to form 5-methylcytosine"
tgccatttctgcagcagcacagggattgagtaaacttcctgttcttaggcatgtgccatccgctataaccaccaaatgttctagccacagcacctggttaaatgtttctcctcaagtctctg

SEQ ID NO: 25374 - DNA, 122 bp, Homo sapiens
  misc_feature (61)..(62): /note="This region represents a CpG dinucleotide"
  misc_feature (61)..(61): /note="Nucleotide may be methylated to form 5-methylcytosine"
ttaagataactcattatttgattgaaataaggttcataaagggaaacaacttttcagtcacggagctagcaaaatataaggctgggacttgaaccaaagtacttattttgccaagtcatgtt

SEQ ID NO: 25375 - DNA, 122 bp, Homo sapiens
  misc_feature (61)..(62): /note="This region represents a CpG dinucleotide"
  misc_feature (61)..(61): /note="Nucleotide may be methylated to form 5-methylcytosine"
acatgggctcttgcagaaaacatctgaagttagttatcccttcctttaatgcatgtgctgcgcttaaccatagcttgtgtcagatcacagccccaaggaataccttcaatggttgcccagag

SEQ ID NO: 25376 - DNA, 122 bp, Homo sapiens
  misc_feature (61)..(62): /note="This region represents a CpG dinucleotide"
  misc_feature (61)..(61): /note="Nucleotide may be methylated to form 5-methylcytosine"
gaaataaatcactctaatttggattcctttatatgagaacttccatatgcttaaaactcccgtagcatttttatagtgtacaggtcataaacatgttgtctgaagatgggcaaagtaggtcg

SEQ ID NO: 25377 - DNA, 122 bp, Homo sapiens
  misc_feature (61)..(62): /note="This region represents a CpG dinucleotide"
  misc_feature (61)..(61): /note="Nucleotide may be methylated to form 5-methylcytosine"
tggctcgaatggctgtgattgctgggctgtgtgtccatagcgtcttttaatcccaagttacgtcacagcttagtgatctcagggtttcaaaagaagctgttagtcctcttaagatttagctt

SEQ ID NO: 25378 - DNA, 122 bp, Homo sapiens
  misc_feature (61)..(62): /note="This region represents a CpG dinucleotide"
  misc_feature (61)..(61): /note="Nucleotide may be methylated to form 5-methylcytosine"
cttgggagctctagaggcctgattcatcctttctctaagcccttcatatgaaactatgtccggcaaagtctcagactcacccaacccttcccatgtccacattcacagctaacaggagccac

SEQ ID NO: 25379 - DNA, 122 bp, Homo sapiens
  misc_feature (61)..(62): /note="This region represents a CpG dinucleotide"
  misc_feature (61)..(61): /note="Nucleotide may be methylated to form 5-methylcytosine"
cttaaaaataacagtaaaaacaagaaacacactgcactatattggtaaacctcaaactcacgtaagtcagttacctgccccgatgggagtttagaagttggtgctactactcttagtactgc

SEQ ID NO: 25380 - DNA, 122 bp, Homo sapiens
  misc_feature (61)..(62): /note="This region represents a CpG dinucleotide"
  misc_feature (61)..(61): /note="Nucleotide may be methylated to form 5-methylcytosine"
ccaccacgcccggccatgaagatctgacatctctagaattcccacaagctgctcagactgcgcaggtgaatgggccagccccaacaaccagcagtgctccatcccttctcagctggggcctg

SEQ ID NO: 25381 - DNA, 122 bp, Homo sapiens
  misc_feature (61)..(62): /note="This region represents a CpG dinucleotide"
  misc_feature (61)..(61): /note="Nucleotide may be methylated to form 5-methylcytosine"
gccatggcatcttccccgtttagatttcctgactctttgtttatcttctttgtcaatgtgcgtctgaaccttcccaacagagtttaaaatgttcaacttcaaagctaaattctgatggaaaa

SEQ ID NO: 25382 - DNA, 122 bp, Homo sapiens
  misc_feature (61)..(62): /note="This region represents a CpG dinucleotide"
  misc_feature (61)..(61): /note="Nucleotide may be methylated to form 5-methylcytosine"
tgcctggtcatagcacagtgtgtacttaggtgaccttgaacaagatgtttctgttatttacgtggctgctcaagctttgtcctgtggactatatattcctaatgacttctttctgtacagtc

SEQ ID NO: 25383 - DNA, 122 bp, Homo sapiens
  misc_feature (61)..(62): /note="This region represents a CpG dinucleotide"
  misc_feature (61)..(61): /note="Nucleotide may be methylated to form 5-methylcytosine"
tacttgtccatgaagcctccctaaagctcatgcctccttgaaaaggtgtcagaactgcctcgaggatgtttcaacccacaacattcttctgtcttctgactttctaagcaattgttgtgtac

SEQ ID NO: 25384 - DNA, 122 bp, Homo sapiens
  misc_feature (61)..(62): /note="This region represents a CpG dinucleotide"
  misc_feature (61)..(61): /note="Nucleotide may be methylated to form 5-methylcytosine"
acaccatgcatttatttaggccacactaatctcttaacccagtgaagcacaaactacattcgcattcaaattggagcctcactggtttcaaagggcccatcattacttcattctgaagcaat

SEQ ID NO: 25385 - DNA, 122 bp, Homo sapiens
  misc_feature (61)..(62): /note="This region represents a CpG dinucleotide"
  misc_feature (61)..(61): /note="Nucleotide may be methylated to form 5-methylcytosine"
actcacaattcctgttgactaaaagagcacccttttccaccacaagcctgacaaatcagacgtccacataatttctgaactcgttttggttaggacaggaagcacaggctcccttcctgtct

SEQ ID NO: 25386 - DNA, 122 bp, Homo sapiens
  misc_feature (61)..(62): /note="This region represents a CpG dinucleotide"
  misc_feature (61)..(61): /note="Nucleotide may be methylated to form 5-methylcytosine"
tctgcaaaaaggaaaaagaaaccacaaattggggaaaaaaaaagaagaaaaacctgtttccgtgtgcaaaagcacacatatgtatgtctgtgttataaaatgactgtgcttgttcgtaacag

SEQ ID NO: 25387 - DNA, 122 bp, Homo sapiens
  misc_feature (61)..(62): /note="This region represents a CpG dinucleotide"
  misc_feature (61)..(61): /note="Nucleotide may be methylated to form 5-methylcytosine"
cttccccagaggcaactaacttcctgcaggtggacttttttcttctagtgtgcactttaacgccttgattacacatgtacgtgtccatgaaacagcatattgtactgcacaagccctttgtg

SEQ ID NO: 25388 - DNA, 122 bp, Homo sapiens
  misc_feature (61)..(62): /note="This region represents a CpG dinucleotide"
  misc_feature (61)..(61): /note="Nucleotide may be methylated to form 5-methylcytosine"
atttttgtctctgacatgctcttgacctctgtggagtttttctactgttgtacatgccaccgacaaggtttgacaagggtgagagagcactggcatctgatgtccatccccacttacccgct

SEQ ID NO: 25389 - DNA, 122 bp, Homo sapiens
  misc_feature (61)..(62): /note="This region represents a CpG dinucleotide"
  misc_feature (61)..(61): /note="Nucleotide may be methylated to form 5-methylcytosine"
tccatggatcagccacagtgactcaggggccctcaaaggaggccttactcacatgtagaacggcaaggcctgccagctcaccagagcagggttcctgtaaatcctgccaaccagtagatcta

SEQ ID NO: 25390 - DNA, 122 bp, Homo sapiens
  misc_feature (61)..(62): /note="This region represents a CpG dinucleotide"
  misc_feature (61)..(61): /note="Nucleotide may be methylated to form 5-methylcytosine"
tcttcctcttaaatgaccgctcatcgctttaaaaccctgtaatgcattagccaccttacccgagtgagggctatagcccagaatggattttatggaataaccttcccctccctgcagcaaac

SEQ ID NO: 25391 - DNA, 122 bp, Homo sapiens
  misc_feature (61)..(62): /note="This region represents a CpG dinucleotide"
  misc_feature (61)..(61): /note="Nucleotide may be methylated to form 5-methylcytosine"
cccccctctctctctttctctctctctctcttgcttggtttctgtaatgaggaagttctccgcagctcagtttcctttccctcactgagcgcctgaaacaggaagtcagtcagttaagctgg

SEQ ID NO: 25392 - DNA, 122 bp, Homo sapiens
  misc_feature (61)..(62): /note="This region represents a CpG dinucleotide"
  misc_feature (61)..(61): /note="Nucleotide may be methylated to form 5-methylcytosine"
ccagagtaacacctcttcatcctcatgagatgggaatcaacccagacctggggagaggagcgccatcgggagacagctaggggctaaggcagccaagcccctcaatatccaagctgccagcc

SEQ ID NO: 25393 - DNA, 122 bp, Homo sapiens
  misc_feature (61)..(62): /note="This region represents a CpG dinucleotide"
  misc_feature (61)..(61): /note="Nucleotide may be methylated to form 5-methylcytosine"
ttgataaatttttcacagcagaacaccccaactgggatttccaaatccttccatcacacacggaggagctaggatttgcaaacccacttgtctgtataccaatcctgtggggaaagacctta

SEQ ID NO: 25394 - DNA, 122 bp, Homo sapiens
  misc_feature (61)..(62): /note="This region represents a CpG dinucleotide"
  misc_feature (61)..(61): /note="Nucleotide may be methylated to form 5-methylcytosine"
cctacttactggggctttgagtatttcaggcactcttgccccatcccctctgtcaccacccgcaagcctcatcaagcctctaatctggaggtgggtggtggtaaatgagcaagagggaactt

SEQ ID NO: 25395 - DNA, 122 bp, Homo sapiens
  misc_feature (61)..(62): /note="This region represents a CpG dinucleotide"
  misc_feature (61)..(61): /note="Nucleotide may be methylated to form 5-methylcytosine"
acctctagaaaaatgttgttttattcttctcgatacattcagtaataatgctgacaaggccgacaaagtgttgactgggagaggaagttatgggactttctggaatatacaaatcagaatga

SEQ ID NO: 25396 - DNA, 122 bp, Homo sapiens
  misc_feature (61)..(62): /note="This region represents a CpG dinucleotide"
  misc_feature (61)..(61): /note="Nucleotide may be methylated to form 5-methylcytosine"
tgaaggctggcaccatgtaccttacccaaaggttgcaagggctggaatgtgcaaaggccacgtcagcagatggttaggtgcaatttcacgcctcaccgcgcagcgacacaaagggaactatt

SEQ ID NO: 25397 - DNA, 122 bp, Homo sapiens
  misc_feature (61)..(62): /note="This region represents a CpG dinucleotide"
  misc_feature (61)..(61): /note="Nucleotide may be methylated to form 5-methylcytosine"
accaagatatctgcaggctgtgagacaaaaagctcagtgacagagttaaccatcagcaaccgtgaggcacaggtttcaatactgagaaggacagggtcagacatccaacttctcagctaccc

SEQ ID NO: 25398 - DNA, 122 bp, Homo sapiens
  misc_feature (61)..(62): /note="This region represents a CpG dinucleotide"
  misc_feature (61)..(61): /note="Nucleotide may be methylated to form 5-methylcytosine"
attaattgaccacccactgtgtagccagctatgtgctaaatgctgaaaaaaataagaatacgttgcaaccctgtcattgaggaggcatattagttagatttctgctgtgacaatattgcata

SEQ ID NO: 25399 - DNA, 122 bp, Homo sapiens
  misc_feature (61)..(62): /note="This region represents a CpG dinucleotide"
  misc_feature (61)..(61): /note="Nucleotide may be methylated to form 5-methylcytosine"
cttcctatgaggaagcccaatcaatcaaaaggtggccactttgctactaagtacttttgccgttagataccttatatccaataaaaagtggcttcctggaatttgaactttctcaccagccc

SEQ ID NO: 25400 - DNA, 122 bp, Homo sapiens
  misc_feature (61)..(62): /note="This region represents a CpG dinucleotide"
  misc_feature (61)..(61): /note="Nucleotide may be methylated to form 5-methylcytosine"
tcatcagaaaaagcagctgatgctaattcaccatctatcaagtttctcttcaccatttcccggagacagattaaagacatgagcaaattgtgctgatgcaagtgataaaatgtgtgtggggg

SEQ ID NO: 25401 - DNA, 122 bp, Homo sapiens
  misc_feature (61)..(62): /note="This region represents a CpG dinucleotide"
  misc_feature (61)..(61): /note="Nucleotide may be methylated to form 5-methylcytosine"
aagggcaggggttcagcacagcaggaagaagaaaaagaaacagcacagcagtaggtctggcggcactctgtggctactcaccaggaatttacaaggagaagctgagcaagtggtttttccat

SEQ ID NO: 25402 - DNA, 122 bp, Homo sapiens
  misc_feature (61)..(62): /note="This region represents a CpG dinucleotide"
  misc_feature (61)..(61): /note="Nucleotide may be methylated to form 5-methylcytosine"
gaattgttttctttagtcttcctattcccttagcagtagacttttacatctaagttgctacgttatcaggaatagctgtatttaatttcactgctatgtacataggacacattaagtgttta

SEQ ID NO: 25403 - DNA, 122 bp, Homo sapiens
  misc_feature (61)..(62): /note="This region represents a CpG dinucleotide"
  misc_feature (61)..(61): /note="Nucleotide may be methylated to form 5-methylcytosine"
catcctcttttgtaatggcctttccatatctagattgttccttcttccaacattcaatagcgtttggcctccttgcctgtgaggtgaacaaattgtggtgtctttctcccctgcagaggagt

SEQ ID NO: 25404 - DNA, 122 bp, Homo sapiens
  misc_feature (61)..(62): /note="This region represents a CpG dinucleotide"
  misc_feature (61)..(61): /note="Nucleotide may be methylated to form 5-methylcytosine"
atgttgcacaactagggagggaaatgttgcacaactagggcatttagattctgcaatatacgttatcttgagtgccatccttgctaatggcaggttaagatactttagttttttgagacagg

SEQ ID NO: 25405 - DNA, 122 bp, Homo sapiens
  misc_feature (61)..(62): /note="This region represents a CpG dinucleotide"
  misc_feature (61)..(61): /note="Nucleotide may be methylated to form 5-methylcytosine"
gccgcactttttgtatgtgagcatgtgtggtttactgtggcgctgctcagccctgaactccgctgagcaggtgttaatagatcactcagtccatgggacacagggtgggtgagtatgtagct

SEQ ID NO: 25406 - DNA, 122 bp, Homo sapiens
  misc_feature (61)..(62): /note="This region represents a CpG dinucleotide"
  misc_feature (61)..(61): /note="Nucleotide may be methylated to form 5-methylcytosine"
caggcctgaggcactgactttgtgacacctgagtgtcagtcacttccctagcctaggtggcgtgccctgcagccctatgcccaagtctctttccttctctcatggcaaactcaggccagcct

SEQ ID NO: 25407 - DNA, 122 bp, Homo sapiens
  misc_feature (61)..(62): /note="This region represents a CpG dinucleotide"
  misc_feature (61)..(61): /note="Nucleotide may be methylated to form 5-methylcytosine"
tcttgcagaggaggaaactgaagctctgagaagttgagtaactcgcccaagatctcacagcggaaagtggtagagctgcaacttacacttcggtttgttgactccaaagcctgtgcttttca

SEQ ID NO: 25408 - DNA, 122 bp, Homo sapiens
  misc_feature (61)..(62): /note="This region represents a CpG dinucleotide"
  misc_feature (61)..(61): /note="Nucleotide may be methylated to form 5-methylcytosine"
tgattttgtgttggttggcctccagctaggagttggtgctctcaagaatgcatcagtatacggaggatcaggcagtgggtgagacctactcctggccttaaagctcccaagagattatgtat

SEQ ID NO: 25409 - DNA, 122 bp, Homo sapiens
  misc_feature (61)..(62): /note="This region represents a CpG dinucleotide"
  misc_feature (61)..(61): /note="Nucleotide may be methylated to form 5-methylcytosine"
cttgtcggttgttattctccagttgcctaccactctctcccatgtgtcatcacgcctcagcgattccttctcaagaaaaggagaagagaaagttgggcatggcattcttgaatggctatggc

SEQ ID NO: 25410 - DNA, 122 bp, Homo sapiens
  misc_feature (61)..(62): /note="This region represents a CpG dinucleotide"
  misc_feature (61)..(61): /note="Nucleotide may be methylated to form 5-methylcytosine"
ttgtaggatgagtgaaaaccgtaaatgctgtgcaggccttaagaggcagacactgggtaccgctggctttatatcaagggcctccccttctctttcaccccagacacaggaagctccagtgc

SEQ ID NO: 25411 - DNA, 122 bp, Homo sapiens
  misc_feature (61)..(62): /note="This region represents a CpG dinucleotide"
  misc_feature (61)..(61): /note="Nucleotide may be methylated to form 5-methylcytosine"
tttccactcaaggactaggaactgaatctctgcacccttaaaaccactctcttagccgggcgcggtggctcatacctgtaatcccagcactttgggaggccaaggcaggtggatcacgaggt

SEQ ID NO: 25412 - DNA, 122 bp, Homo sapiens
  misc_feature (61)..(62): /note="This region represents a CpG dinucleotide"
  misc_feature (61)..(61): /note="Nucleotide may be methylated to form 5-methylcytosine"
ttctgtaaaatattagaggcgagtattatcagccccacggacaggtgaagaagtggaagacgagaaacttgatgatttgccaaaggtcacagagctagaaggaggcagagccaccccacact

SEQ ID NO: 25413 - DNA, 122 bp, Homo sapiens
  misc_feature (61)..(62): /note="This region represents a CpG dinucleotide"
  misc_feature (61)..(61): /note="Nucleotide may be methylated to form 5-methylcytosine"
attatcattagacctgcctccaggtctagctaatgtcttattcagtatgaatagcagtggcgtttgggcagggaggtgatgagatgcctattaaggtaacagaggtgtccaatggaacattg

SEQ ID NO: 25414 - DNA, 122 bp, Homo sapiens
  misc_feature (61)..(62): /note="This region represents a CpG dinucleotide"
  misc_feature (61)..(61): /note="Nucleotide may be methylated to form 5-methylcytosine"
aaacatgtccacaaattagtagccctgaatcacaaaaaattctgtagcatctgtgggcaacgtttattcaattgagatataaactgaattgcaggcaggcatcccatcagctcgtctggtgc

SEQ ID NO: 25415 - DNA, 122 bp, Homo sapiens
  misc_feature (61)..(62): /note="This region represents a CpG dinucleotide"
  misc_feature (61)..(61): /note="Nucleotide may be methylated to form 5-methylcytosine"
tatgagcttcactggcttcaagtgcctgtacccaatatgttcctggtttcaatgagtaatcgctgactatgtctctatcctgtaatttcttcagcttgtgtcacagtgagacagtgagcatg

SEQ ID NO: 25416 - DNA, 122 bp, Homo sapiens
  misc_feature (61)..(62): /note="This region represents a CpG dinucleotide"
  misc_feature (61)..(61): /note="Nucleotide may be methylated to form 5-methylcytosine"
agagggaaaagccagaatggtaagcacagggttctgtcccacagctgcctccaggaggcacgtaagagaaggcaggggttatcagagccagcaaccaggggccttggttctggtggctgtgt

SEQ ID NO: 25417 - DNA, 122 bp, Homo sapiens
  misc_feature (61)..(62): /note="This region represents a CpG dinucleotide"
  misc_feature (61)..(61): /note="Nucleotide may be methylated to form 5-methylcytosine"
ggccctgctagcaccttgactttggacttctgacctccagaactgtgaggggacaagccacgcgggttgtggtatttgcacagcagcctgggaccctaacccatcacctcaactcacgccct

SEQ ID NO: 25418 - DNA, 122 bp, Homo sapiens
  misc_feature (61)..(62): /note="This region represents a CpG dinucleotide"
  misc_feature (61)..(61): /note="Nucleotide may be methylated to form 5-methylcytosine"
cttcgcgacaggaacggagggccaggacagcgagacgcgctcagcgaggcccctcccccacgaccccccatctctatagttaccagctaaggtagattgacggggtagggggaggtggaccc

SEQ ID NO: 25419 - DNA, 122 bp, Homo sapiens
  misc_feature (61)..(62): /note="This region represents a CpG dinucleotide"
  misc_feature (61)..(61): /note="Nucleotide may be methylated to form 5-methylcytosine"
gacatttgcacatgctgcttccacctctatccctagctaactgctactcatctttagcttcgatatgactccttcaggcaagccttccttgacttcccagactaggtcaggttatcccttga

SEQ ID NO: 25420 - DNA, 122 bp, Homo sapiens
  misc_feature (61)..(62): /note="This region represents a CpG dinucleotide"
  misc_feature (61)..(61): /note="Nucleotide may be methylated to form 5-methylcytosine"
tcatgaatggagaatttcttcattctttcagggcgagtacagcctttggtcaaattgtgccgtaggtgagtactccccaccgcaccaattctacccctgccccataactggtattctgccat

SEQ ID NO: 25421 - DNA, 122 bp, Homo sapiens
  misc_feature (61)..(62): /note="This region represents a CpG dinucleotide"
  misc_feature (61)..(61): /note="Nucleotide may be methylated to form 5-methylcytosine"
ttgctgcctacactctatgctttcttcacttaccaagcaacacacttcatcagttgtccacgagaaattttattatgtggaaagttcgtattgaatgtgtctgccaaatcttttgcaagaaa

SEQ ID NO: 25422 - DNA, 122 bp, Homo sapiens
  misc_feature (61)..(62): /note="This region represents a CpG dinucleotide"
  misc_feature (61)..(61): /note="Nucleotide may be methylated to form 5-methylcytosine"
ccacaggcaaccattccttactcatacaagagcggatacattatcataggtatcttacaccgtgtcagcagttattcaaaagccaatctttaaattatgcagcttttctgcctcaactggtc

SEQ ID NO: 25423 - DNA, 122 bp, Homo sapiens
  misc_feature (61)..(62): /note="This region represents a CpG dinucleotide"
  misc_feature (61)..(61): /note="Nucleotide may be methylated to form 5-methylcytosine"
aggtgacagtgagccaagatcaagccactgcactccagcctgggcaacagagcaagattacgttcacacagcttataagcagtcacacagcttgtaagtagtggagcttgtaagtagtagct

SEQ ID NO: 25424 - DNA, 122 bp, Homo sapiens
  misc_feature (61)..(62): /note="This region represents a CpG dinucleotide"
  misc_feature (61)..(61): /note="Nucleotide may be methylated to form 5-methylcytosine"
agggccagctagtcttaggctaaagggatggtatatgggtggacacttggaggggtagttcgcagttatctcttcatccaaagcatgacctgaggccaaagcatgacctgaggccggtcctg

SEQ ID NO: 25425 - DNA, 122 bp, Homo sapiens
  misc_feature (61)..(62): /note="This region represents a CpG dinucleotide"
  misc_feature (61)..(61): /note="Nucleotide may be methylated to form 5-methylcytosine"
tataccttccattgaaaagaaataatttacatctctactggacaaaaatctatgggttaacgtctgcattctaagagttgtaaagtagtccaatcagtagtaagccaagccaaacactactc

SEQ ID NO: 25426 - DNA, 122 bp, Homo sapiens
  misc_feature (61)..(62): /note="This region represents a CpG dinucleotide"
  misc_feature (61)..(61): /note="Nucleotide may be methylated to form 5-methylcytosine"
ttgttcagctcactccttcttctccttcctgagcagctgacttattctgatgtggttttgcggttatacagtaagcagcactgcttatgtggacatggtgtactttcagtttctgaaagtga

SEQ ID NO: 25427 - DNA, 122 bp, Homo sapiens
  misc_feature (61)..(62): /note="This region represents a CpG dinucleotide"
  misc_feature (61)..(61): /note="Nucleotide may be methylated to form 5-methylcytosine"
gttgaattcattttctgagactaattaatctgagacctttgaagaggaagtgcggttgaacgtgaagaaggaaccattattgacagtatcccaggagctacgcattgccaggcatattcaat

SEQ ID NO: 25428 - DNA, 122 bp, Homo sapiens
  misc_feature (61)..(62): /note="This region represents a CpG dinucleotide"
  misc_feature (61)..(61): /note="Nucleotide may be methylated to form 5-methylcytosine"
ccctatcaagcaaacacatgcactcagtgctttaatctaatgaatgacttggtagttacacgtgtatagatactaatgttataattaccatatgcctagtgatcctgctggcctgccatccc

SEQ ID NO: 25429 - DNA, 122 bp, Homo sapiens
  misc_feature (61)..(62): /note="This region represents a CpG dinucleotide"
  misc_feature (61)..(61): /note="Nucleotide may be methylated to form 5-methylcytosine"
ataagaaaacttccatttcctctttgattacgactgaactagacttaagatcagtctctgcgccaggcgcagtggttcatgcctgtagtcccagctactcgggaggctgagacaagaagatc

SEQ ID NO: 25430 - DNA, 122 bp, Homo sapiens
  misc_feature (61)..(62): /note="This region represents a CpG dinucleotide"
  misc_feature (61)..(61): /note="Nucleotide may be methylated to form 5-methylcytosine"
gtgacttgtttctaaccaaaagaatgtggcaagtgatactaagtcacctctgaggttaggcgacaaaggctgtgtacaccctgccttcctctctctagcttgctcactgggatggtagccag

SEQ ID NO: 25431 - DNA, 122 bp, Homo sapiens
  misc_feature (61)..(62): /note="This region represents a CpG dinucleotide"
  misc_feature (61)..(61): /note="Nucleotide may be methylated to form 5-methylcytosine"
tgttttagaaaactaagtagtaggtactcctagaaatatcatgagaaaagcttttggctccgagaactgtgaacctctcattttacaaaccatgtaaatagatccctccccagtctcccaat

SEQ ID NO: 25432 - DNA, 122 bp, Homo sapiens
  misc_feature (61)..(62): /note="This region represents a CpG dinucleotide"
  misc_feature (61)..(61): /note="Nucleotide may be methylated to form 5-methylcytosine"
ataaatcagttaatccctatagcaagcctccattgtgaataccataattatcttaacagacgaggagactgaggcacaatgaagttaagaaactttcctagagtcacacgaaattggtgggg

SEQ ID NO: 25433 - DNA, 122 bp, Homo sapiens
  misc_feature (61)..(62): /note="This region represents a CpG dinucleotide"
  misc_feature (61)..(61): /note="Nucleotide may be methylated to form 5-methylcytosine"
aatgctgcagtcacaaaagcaggccggccccacacatatctttgcagtgctgggagccaccgctcgtggtcagcaaggtgatctcactgcacaaaactgattacaatcagaaatgctgccag

SEQ ID NO: 25434 - DNA, 122 bp, Homo sapiens
  misc_feature (61)..(62): /note="This region represents a CpG dinucleotide"
  misc_feature (61)..(61): /note="Nucleotide may be methylated to form 5-methylcytosine"
catatcccggacaagacccagaagggaagcccccagagccaagggtaggagggccccacccgggtctcagccactcacttctccagggcggatccgagacactcacaggcctcagggagggg

SEQ ID NO: 25435 - DNA, 122 bp, Homo sapiens
  misc_feature (61)..(62): /note="This region represents a CpG dinucleotide"
  misc_feature (61)..(61): /note="Nucleotide may be methylated to form 5-methylcytosine"
acaaaagacactttctaagcggatacagccttctgaataacaggatatgaggggagcaggcggatctggatctactctgtgagtcacggcccatgcccaaaacccccccacatcaaccccag

SEQ ID NO: 25436 - DNA, 122 bp, Homo sapiens
  misc_feature (61)..(62): /note="This region represents a CpG dinucleotide"
  misc_feature (61)..(61): /note="Nucleotide may be methylated to form 5-methylcytosine"
acctcggcctcccaaagtgctgggattacaggcgtgagccactaagcccggccagcaacacgcttttaccgctgcaaatccggatcaggcaggctttgaagcccagctcacaggccgtctct

SEQ ID NO: 25437 - DNA, 122 bp, Homo sapiens
  misc_feature (61)..(62): /note="This region represents a CpG dinucleotide"
  misc_feature (61)..(61): /note="Nucleotide may be methylated to form 5-methylcytosine"
gcaagatcaaagcgccagtgattcagctcctggtgagggctgtcttcctgtcttgctgatcgccatgttgtagctgtgttctcacatggcacagagaaagagggagagacagaaagggggag

SEQ ID NO: 25438 - DNA, 122 bp, Homo sapiens
  misc_feature (61)..(62): /note="This region represents a CpG dinucleotide"
  misc_feature (61)..(61): /note="Nucleotide may be methylated to form 5-methylcytosine"
atttcccctcttagtcatttcccctcttagtccagttttacctgaagacaaattaatatacgcattacaccagtgaggaaagaggagggcaaggcgaagctgagagtcccctctagccttgc

SEQ ID NO: 25439 - DNA, 122 bp, Homo sapiens
  misc_feature (61)..(62): /note="This region represents a CpG dinucleotide"
  misc_feature (61)..(61): /note="Nucleotide may be methylated to form 5-methylcytosine"
cacaccattagagatgaatgccctcagcagaaggcaaaagtaggttacatcccttggttacgtgccagcccaaagatgccgacacagtggaattgagccccacaatggtcatttatctaatg

SEQ ID NO: 25440 - DNA, 122 bp, Homo sapiens
  misc_feature (61)..(62): /note="This region represents a CpG dinucleotide"
  misc_feature (61)..(61): /note="Nucleotide may be methylated to form 5-methylcytosine"
aactaagacacagtccccttcttcaaagagtctagtgggggagtgagacatttaaacaggcgatgacaatacatgattcacactaagattggggttgatgatgagcacagcattttcgaagc

SEQ ID NO: 25441 - DNA, 122 bp, Homo sapiens
  misc_feature (61)..(62): /note="This region represents a CpG dinucleotide"
  misc_feature (61)..(61): /note="Nucleotide may be methylated to form 5-methylcytosine"
tgaggtgggggaggtgggagaggcataatctgggtcttgaggacgtttcagccctcagcccggggtggctgagatatggccctgggtaggctctgtcctccagaggtggaaagaaggacaaa

SEQ ID NO: 25442 - DNA, 122 bp, Homo sapiens
  misc_feature (61)..(62): /note="This region represents a CpG dinucleotide"
  misc_feature (61)..(61): /note="Nucleotide may be methylated to form 5-methylcytosine"
ttggcatattccagggttttatgtctctcctcccttcattttccctcagggcaggttgtgcgcatgcgcagtggcctgccagcgcttgggagaggctgcaaacacagtgtatttacagaagt

SEQ ID NO: 25443 - DNA, 122 bp, Homo sapiens
  misc_feature (61)..(62): /note="This region represents a CpG dinucleotide"
  misc_feature (61)..(61): /note="Nucleotide may be methylated to form 5-methylcytosine"
tccgtgagatctgatcaccctccatatctgatcgggtttctcattctctgccatcccccacgtgatgtcctcagcaagaatcctgttaggttgggttagccagaatccccctgactgtgaca

SEQ ID NO: 25444 - DNA, 122 bp, Homo sapiens
  misc_feature (61)..(62): /note="This region represents a CpG dinucleotide"
  misc_feature (61)..(61): /note="Nucleotide may be methylated to form 5-methylcytosine"
caccccccagagcgaagctgcctgtacaggccacgtcctctcctccagcagccggctacgcgcagctctccggcacagccatcacctgcaccactaaagcgggtggcagtttctgcccgtga

SEQ ID NO: 25445 - DNA, 122 bp, Homo sapiens
  misc_feature (61)..(62): /note="This region represents a CpG dinucleotide"
  misc_feature (61)..(61): /note="Nucleotide may be methylated to form 5-methylcytosine"
ccatttctgtttaacagtgattcattagtttgggctgtagagtggatcagctggtgtttacgaaggtatcattgtaccagtgagtcacagaggcatctactgattctcattcactctcagaa

SEQ ID NO: 25446 - DNA, 122 bp, Homo sapiens
  misc_feature (61)..(62): /note="This region represents a CpG dinucleotide"
  misc_feature (61)..(61): /note="Nucleotide may be methylated to form 5-methylcytosine"
atacttacagacatttccttaataattctacctaactgtcattttccaacagtctcttcacgtgaatagtcaccgatcactgctgggtgcagtggctcatgcctgtaatcccagcactttgg

SEQ ID NO: 25447 - DNA, 122 bp, Homo sapiens
  misc_feature (61)..(62): /note="This region represents a CpG dinucleotide"
  misc_feature (61)..(61): /note="Nucleotide may be methylated to form 5-methylcytosine"
gagtgtgagctgcatgatgctgccttgcagcagccctttgctgacctaactgggctctggcgagcacccagtgaagtggatgacaaaaaggcatgacaaagatcaagcaactcaagaaaggt

SEQ ID NO: 25448 - DNA, 122 bp, Homo sapiens
  misc_feature (61)..(62): /note="This region represents a CpG dinucleotide"
  misc_feature (61)..(61): /note="Nucleotide may be methylated to form 5-methylcytosine"
tgattaagggacctgttccctccacccgtggctcaccagcccctagacctcaaaggtttccgcattcactggcagacaggaaatgacaatagaagaagcccagcctgtatcttaaaagccct

SEQ ID NO: 25449 - DNA, 122 bp, Homo sapiens
  misc_feature (61)..(62): /note="This region represents a CpG dinucleotide"
  misc_feature (61)..(61): /note="Nucleotide may be methylated to form 5-methylcytosine"
attccaccttagtagacaaacccaaaacatttatgtgcatagaaaaaaattctggaaggtcgtacacagtgaatttctctgagtgaaaagattgtgggtgagtgattctgtgtgtatttttc

SEQ ID NO: 25450 - DNA, 122 bp, Homo sapiens
  misc_feature (61)..(62): /note="This region represents a CpG dinucleotide"
  misc_feature (61)..(61): /note="Nucleotide may be methylated to form 5-methylcytosine"
taccatctaggtttgtgtaaccacactctatgatgtttgcacaatagcgaaattgcccaacgacaaatttcgcagaatgtatccattgttgagtgatgcatggctgtgtaatgcaggtgctt

SEQ ID NO: 25451 - DNA, 122 bp, Homo sapiens
  misc_feature (61)..(62): /note="This region represents a CpG dinucleotide"
  misc_feature (61)..(61): /note="Nucleotide may be methylated to form 5-methylcytosine"
ggtttgtctggcctggacagtgagcttactgttgtcacctccaggttgccctgggagaaccgggtctagagcaggacctgtcaccatttccaacaccatttctcttctgaaagggtgcctaa

SEQ ID NO: 25452 - DNA, 122 bp, Homo sapiens
  misc_feature (61)..(62): /note="This region represents a CpG dinucleotide"
  misc_feature (61)..(61): /note="Nucleotide may be methylated to form 5-methylcytosine"
tcagggtcctttcagaaaataggaaccattctaaatacttcaaacagggataatttaatacgggatattaaatgatataggtgatgaaagctctagaagccaaaccaggaatggtgactcat

SEQ ID NO: 25453 - DNA, 122 bp, Homo sapiens
  misc_feature (61)..(62): /note="This region represents a CpG dinucleotide"
  misc_feature (61)..(61): /note="Nucleotide may be methylated to form 5-methylcytosine"
tagagttggaaagtaaatttaccatctagtcctcattttacacatagggagcctggtggacggaactgggaagcaatgtgtcagagtacagtatgtggtgaggtcactaaacaggttcagtt

SEQ ID NO: 25454 - DNA, 122 bp, Homo sapiens
  misc_feature (61)..(62): /note="This region represents a CpG dinucleotide"
  misc_feature (61)..(61): /note="Nucleotide may be methylated to form 5-methylcytosine"
cctcgaggagtttccccttgtgtaaaccggtatcgcgtcccttccagctctgacatcctgcggttctagaatacccattgattgaaagagctgtggccaaacaggaaggacagagtaagagc

SEQ ID NO: 25455 - DNA, 122 bp, Homo sapiens
  misc_feature (61)..(62): /note="This region represents a CpG dinucleotide"
  misc_feature (61)..(61): /note="Nucleotide may be methylated to form 5-methylcytosine"
gacccctgctccaagatgcaaatccacagctttggatcagtttgtaagtgtgagtaaagccgaaagtaatgcatgatacagatgaggtgttcacatttaattctgctaaaatgacaccatga

SEQ ID NO: 25456 - DNA, 122 bp, Homo sapiens
  misc_feature (61)..(62): /note="This region represents a CpG dinucleotide"
  misc_feature (61)..(61): /note="Nucleotide may be methylated to form 5-methylcytosine"
cctccagtactttgctgctcaagtttcaggagctgtttttcaagttttgaggtgtttactcgatgcatcatcagaaactggccattcaagtgaaagacaggaatatcaaatttatacctttc

SEQ ID NO: 25457 - DNA, 122 bp, Homo sapiens
  misc_feature (61)..(62): /note="This region represents a CpG dinucleotide"
  misc_feature (61)..(61): /note="Nucleotide may be methylated to form 5-methylcytosine"
tttctttccttctggttacttcgtttagtctgttcattttttatgatcatactataatgacggaggctaactcttgcttagtacgtggcaggcactatgccaaatcatctacaggaattatc

SEQ ID NO: 25458 - DNA, 122 bp, Homo sapiens
  misc_feature (61)..(62): /note="This region represents a CpG dinucleotide"
  misc_feature (61)..(61): /note="Nucleotide may be methylated to form 5-methylcytosine"
gttaatccacaaatatttcttgaacaaataaagtttgtctgtcttagaatgatctatactcgatgagaggttggactatctcatgtctaagtactatgaccaagctggaggttacatgacct

SEQ ID NO: 25459 - DNA, 122 bp, Homo sapiens
  misc_feature (61)..(62): /note="This region represents a CpG dinucleotide"
  misc_feature (61)..(61): /note="Nucleotide may be methylated to form 5-methylcytosine"
caggcctgggccctgatggttctgtggtttccatgggagggccttcaaggttgtgacatccgctccccatacagtatgatgtgtgttatgtattattttgaggataggggaagatgattccc

SEQ ID NO: 25460 - DNA, 122 bp, Homo sapiens
  misc_feature (61)..(62): /note="This region represents a CpG dinucleotide"
  misc_feature (61)..(61): /note="Nucleotide may be methylated to form 5-methylcytosine"
actgtgagagtctgggggactctctgctattgactcattgcattatcatctattccatgacgttgatgatgatgactaagagaattgcaacaataatgaggacaacagacaaggctaataac

SEQ ID NO: 25461 - DNA, 122 bp, Homo sapiens
  misc_feature (61)..(62): /note="This region represents a CpG dinucleotide"
  misc_feature (61)..(61): /note="Nucleotide may be methylated to form 5-methylcytosine"
ggaacacatcctcagatgagtcagcagtctgccatcttccagattcaagtattgttcaaacgcttttggctaaagattaagcaagaacagagattattcattttctgtgtcataacatcatc

SEQ ID NO: 25462 - DNA, 122 bp, Homo sapiens
  misc_feature (61)..(62): /note="This region represents a CpG dinucleotide"
  misc_feature (61)..(61): /note="Nucleotide may be methylated to form 5-methylcytosine"
accctcgagccctgcttcccaggtccgcattcccaggcagcctgccacagccagtgccagcgagagagtggatcaggcttcaggatagcccagcactgaggacatctaaaacagtcttcatt

SEQ ID NO: 25463 - DNA, 122 bp, Homo sapiens
  misc_feature (61)..(62): /note="This region represents a CpG dinucleotide"
  misc_feature (61)..(61): /note="Nucleotide may be methylated to form 5-methylcytosine"
ccagtacctactgttgcttgaggtttcttataatagagcaggatgagcaacacgacttctcgttttgtaatttggcacatatgtatatgttttatacatacatgctatgtgtctatatgtac

SEQ ID NO: 25464 - DNA, 122 bp, Homo sapiens
  misc_feature (61)..(62): /note="This region represents a CpG dinucleotide"
  misc_feature (61)..(61): /note="Nucleotide may be methylated to form 5-methylcytosine"
gtattggttcttggtcagtctgctgaattcaaaacactattacctttaatcagcaacttgcgggtgttttattaatagagctgaaaaaggctcatctaacatataagaatttcctggtttcc

SEQ ID NO: 25465 - DNA, 122 bp, Homo sapiens
  misc_feature (61)..(62): /note="This region represents a CpG dinucleotide"
  misc_feature (61)..(61): /note="Nucleotide may be methylated to form 5-methylcytosine"
agagcaactgagcttgctgcctagcggtgccacttccctgctctgcgctaaggctatcgtcgaaggcccagagacaccttgaccctggaaacccaatccagcacgtcctgcctccccacaaa

SEQ ID NO: 25466 - DNA, 122 bp, Homo sapiens
  misc_feature (61)..(62): /note="This region represents a CpG dinucleotide"
  misc_feature (61)..(61): /note="Nucleotide may be methylated to form 5-methylcytosine"
caaagttggacacatgggtcatgatttctaagctcctagattcctgcttaatctgcctttcgaatcatagggctttctggtatcttcagagctgtttccaggtgctctcagtagacagagtt

SEQ ID NO: 25467 - DNA, 122 bp, Homo sapiens
  misc_feature (61)..(62): /note="This region represents a CpG dinucleotide"
  misc_feature (61)..(61): /note="Nucleotide may be methylated to form 5-methylcytosine"
tttcctcgacactgtgaagggtatgatgtcatcgttcacaggtgcagtcctggatgtacacgcagtttccacggaaatgctgtcatttggcagtgttgccttcgacagcctaattacctgat

SEQ ID NO: 25468 - DNA, 122 bp, Homo sapiens
  misc_feature (61)..(62): /note="This region represents a CpG dinucleotide"
  misc_feature (61)..(61): /note="Nucleotide may be methylated to form 5-methylcytosine"
gagttaatatgactgtcacaaacttactgcacaaagaagcaggaaacatctgtataaatgcgtccacacagagcctgagtccagaaatgaaaagcagaagctgtgggagcctgtgattacaa

SEQ ID NO: 25469 - DNA, 122 bp, Homo sapiens
  misc_feature (61)..(62): /note="This region represents a CpG dinucleotide"
  misc_feature (61)..(61): /note="Nucleotide may be methylated to form 5-methylcytosine"
tttttccatgggcctcattgcacacttctctagtgcttcccatgaacacacttaattggccgtgtgtcagctcaattgctgagctgatctaagtcatgatgaatctttcctgctctttgccc

SEQ ID NO: 25470 - DNA, 122 bp, Homo sapiens
  misc_feature (61)..(62): /note="This region represents a CpG dinucleotide"
  misc_feature (61)..(61): /note="Nucleotide may be methylated to form 5-methylcytosine"
cagaagagcttcctggggcctcggaaggattactgggactttctctgcactgccctacgacggcagcggggaaacatggagccaatccactttgtccgttcccaggacaaggtatccagggc

SEQ ID NO: 25471 - DNA, 122 bp, Homo sapiens
  misc_feature (61)..(62): /note="This region represents a CpG dinucleotide"
  misc_feature (61)..(61): /note="Nucleotide may be methylated to form 5-methylcytosine"
aaaacctgaacgttggatgtgagtattatgctacacttataaattcagatgaaagcccagcgaaatgggaaatgaatactctttgagaccttatttattctctaactccttctgttctgaaa

SEQ ID NO: 25472 - DNA, 122 bp, Homo sapiens
  misc_feature (61)..(62): /note="This region represents a CpG dinucleotide"
  misc_feature (61)..(61): /note="Nucleotide may be methylated to form 5-methylcytosine"
ctgactcacttaccaaacacatagtttatatttgttcctcttattgtcatttattactcacgtattttttacacaaacaccacagttgttgaaagagtttcataaggtgatgttcagctaac

SEQ ID NO: 25473 - DNA, 122 bp, Homo sapiens
  misc_feature (61)..(62): /note="This region represents a CpG dinucleotide"
  misc_feature (61)..(61): /note="Nucleotide may be methylated to form 5-methylcytosine"
catgcttttcagcatctccaccttcaactgctgttatctgtctgccctagcttcttccagcgccccagggaaaaagctgcatcacattttggagggaaataaagaaagagaactaaagacct

SEQ ID NO: 25474 - DNA, 122 bp, Homo sapiens
  misc_feature (61)..(62): /note="This region represents a CpG dinucleotide"
  misc_feature (61)..(61): /note="Nucleotide may be methylated to form 5-methylcytosine"
actcccaccaccaaccctcccctggtgctcccagttgggcaatatggccagaggtgagcacgtttgtcaggaatggaattaggcagggaatgaaaacaggtctggcctctgggaaaactggc

SEQ ID NO: 25475 - DNA, 122 bp, Homo sapiens
  misc_feature (61)..(62): /note="This region represents a CpG dinucleotide"
  misc_feature (61)..(61): /note="Nucleotide may be methylated to form 5-methylcytosine"
gcaggcagctcccctgaacgctgagagcttctgtgatctctaggatgtggctgggctgctcgtggggcatgttaggaaacccagaagctgaggccccaggatggttgtcagtgaatgaatac

SEQ ID NO: 25476 - DNA, 122 bp, Homo sapiens
  misc_feature (61)..(62): /note="This region represents a CpG dinucleotide"
  misc_feature (61)..(61): /note="Nucleotide may be methylated to form 5-methylcytosine"
ccccatttgccttttcccccagcaatagttttatgagaatataaataacctgtttcacaacgttccgtttctcacataagccttgtttggttccgaggtcattgtgatttcagtggttgtag

SEQ ID NO: 25477 - DNA, 122 bp, Homo sapiens
  misc_feature (61)..(62): /note="This region represents a CpG dinucleotide"
  misc_feature (61)..(61): /note="Nucleotide may be methylated to form 5-methylcytosine"
tgattaagtcagctcaactccctgactataagaaatcaccatgtgagtctttgaagaatgcgccccctaccaatgccatgctgtgcctacgctaacctttaagcaagtacaccggcaaccct

SEQ ID NO: 25478 - DNA, 122 bp, Homo sapiens
  misc_feature (61)..(62): /note="This region represents a CpG dinucleotide"
  misc_feature (61)..(61): /note="Nucleotide may be methylated to form 5-methylcytosine"
cagtatttctcctgacaggtaattatgaggtacttgcgtgaccccagcaatccccggtgccgcccacatcattgcaagtgcgggtaactcctgaaatgactctaattggactttatccacat

SEQ ID NO: 25479 - DNA, 122 bp, Homo sapiens
  misc_feature (61)..(62): /note="This region represents a CpG dinucleotide"
  misc_feature (61)..(61): /note="Nucleotide may be methylated to form 5-methylcytosine"
tctgacctgaggacagtaagcctatggctctctcacaccagggtgtggagactaaatgcacgcaggggctcctggcctcaccggctctaggaacctctctccagcgacagtagtaggaatga

SEQ ID NO: 25480 - DNA, 122 bp, Homo sapiens
  misc_feature (61)..(62): /note="This region represents a CpG dinucleotide"
  misc_feature (61)..(61): /note="Nucleotide may be methylated to form 5-methylcytosine"
atccgcctcagcctcccaaagtgctgggattacaggtgtacaccctgcccagccacaagccgatttttaaaaggtcaaatgctatgacagccattttacaggaaaaaaaaaaattgtatagt

SEQ ID NO: 25481 - DNA, 122 bp, Homo sapiens
  misc_feature (61)..(62): /note="This region represents a CpG dinucleotide"
  misc_feature (61)..(61): /note="Nucleotide may be methylated to form 5-methylcytosine"
gtgcaaagcagtactttagtttgtcagttgagcctccctttctgccacttcccctttttgcggccctgggaatcaagcaagaaatgaaaatgtccgaagcagcctgtgagctagtgatctgc

SEQ ID NO: 25482 - DNA, 122 bp, Homo sapiens
  misc_feature (61)..(62): /note="This region represents a CpG dinucleotide"
  misc_feature (61)..(61): /note="Nucleotide may be methylated to form 5-methylcytosine"
cacttggttcccatcttctccctctttcctgcactatatctaaacaaaccttttgacaaccggtaaactgggaattttgactgtaggatccacagttctaagatatttaaaatcttcccctt

SEQ ID NO: 25483 - DNA, 122 bp, Homo sapiens
  misc_feature (61)..(62): /note="This region represents a CpG dinucleotide"
  misc_feature (61)..(61): /note="Nucleotide may be methylated to form 5-methylcytosine"
tgaagagaaaaatgaaccctagggctcagagtactgcagcagatcatttggtattgcttccgtggagtgtagcgagccaactaaatactttgacgccagtgggaatagtgataattatggta

SEQ ID NO: 25484 - DNA, 122 bp, Homo sapiens
  misc_feature (61)..(62): /note="This region represents a CpG dinucleotide"
  misc_feature (61)..(61): /note="Nucleotide may be methylated to form 5-methylcytosine"
taaccgcaggtcctaactcagagcagcctccggcgcgggtggcgcggataccgaggcctgcgggggacatccgccgcctggaacgccccgcccggtcagccagcccctcaggggcggcgagc

SEQ ID NO: 25485 - DNA, 122 bp, Homo sapiens
  misc_feature (61)..(62): /note="This region represents a CpG dinucleotide"
  misc_feature (61)..(61): /note="Nucleotide may be methylated to form 5-methylcytosine"
ccgcctcgccctgtgcaagctcggtgcagtgcagcccctccggctctcgccccacaatgccgtgcgcaggctggcagcagttcagctgaggactaaacgcttggctcaagttcaacacggct

SEQ ID NO: 25486 - DNA, 122 bp, Homo sapiens
  misc_feature (61)..(62): /note="This region represents a CpG dinucleotide"
  misc_feature (61)..(61): /note="Nucleotide may be methylated to form 5-methylcytosine"
gcttacccgcatttcatgtccatcctgcaccactgcctccaaatgccttgtaagtgtgttcgtgactcacatgtgtgcttctgaatgtttggacattgtcctaatgggttctggctcctgca

SEQ ID NO: 25487 - DNA, 122 bp, Homo sapiens
  misc_feature (61)..(62): /note="This region represents a CpG dinucleotide"
  misc_feature (61)..(61): /note="Nucleotide may be methylated to form 5-methylcytosine"
gcacttacacaaacctagatggtatcacctactacaggcctaggctagatggtatatagccgattgctcctagtctacaaacctgttcagtatgctacttttctgaatactgtagtcagttg

SEQ ID NO: 25488 - DNA, 122 bp, Homo sapiens
  misc_feature (61)..(62): /note="This region represents a CpG dinucleotide"
  misc_feature (61)..(61): /note="Nucleotide may be methylated to form 5-methylcytosine"
aagtaggctatcatgagaaatgctgggggtgtggagcccttgcaaacacttcccaggatccgaaagcagaaaggatagaggaaaggcattagactaagccatgagagtcatggcaggaagag

SEQ ID NO: 25489 - DNA, 122 bp, Homo sapiens
  misc_feature (61)..(62): /note="This region represents a CpG dinucleotide"
  misc_feature (61)..(61): /note="Nucleotide may be methylated to form 5-methylcytosine"
aatgggggagcccttctttagttgataaggtagtgaagagatgccaaacactagggcctgcgtggagctttatggagcagttaaccttgagacttacctgtatgtaaagataaaactgcaac

SEQ ID NO: 25490 - DNA, 122 bp, Homo sapiens
  misc_feature (61)..(62): /note="This region represents a CpG dinucleotide"
  misc_feature (61)..(61): /note="Nucleotide may be methylated to form 5-methylcytosine"
ctgacaagctggtcattgcattcagaggacttggatccactcatttgattttgaaaactacgagagataaagagagttaaggtagaaaatgtcaatacatggctgggcatggtggctcatgc

SEQ ID NO: 25491 - DNA, 122 bp, Homo sapiens
  misc_feature (61)..(62): /note="This region represents a CpG dinucleotide"
  misc_feature (61)..(61): /note="Nucleotide may be methylated to form 5-methylcytosine"
ctggggcctctttcttcccgagtctcggccaggtctgaggtgaagcaggaaggccccatacggggtggctaggaatgccctgtgtggactcccaggggtccagtgacttccctaagaccacc

SEQ ID NO: 25492 - DNA, 122 bp, Homo sapiens
  misc_feature (61)..(62): /note="This region represents a CpG dinucleotide"
  misc_feature (61)..(61): /note="Nucleotide may be methylated to form 5-methylcytosine"
gtagctgcaaggccctgactaatcacttgtatattctcatgacaagcctagtccctggtacgtaagtagttaagactactttcagaatgcagtcttaaaatatattatagaagatgggtgca

SEQ ID NO: 25493 - DNA, 122 bp, Homo sapiens
  misc_feature (61)..(62): /note="This region represents a CpG dinucleotide"
  misc_feature (61)..(61): /note="Nucleotide may be methylated to form 5-methylcytosine"
gcattttgaaatatgacacaccctgggagaaatcattcctggcaggagctcttggtgagccgtgctcatcccattcaaggttgatgaatagaacattaagaataattagcacaagactgtct

SEQ ID NO: 25494 - DNA, 122 bp, Homo sapiens
  misc_feature (61)..(62): /note="This region represents a CpG dinucleotide"
  misc_feature (61)..(61): /note="Nucleotide may be methylated to form 5-methylcytosine"
gtgtatgaagtccatcgagtgccttctgcaaacagtttcactcagacacttatctgtgagcgtaggggcaacagcaagatctaacatttcctcatttgtttcggtgcttatcatgttcttag

SEQ ID NO: 25495 - DNA, 122 bp, Homo sapiens
  misc_feature (61)..(62): /note="This region represents a CpG dinucleotide"
  misc_feature (61)..(61): /note="Nucleotide may be methylated to form 5-methylcytosine"
tgatgttatccgacatccctttcaaacattctattaaaaacctcaagctacacgagtgcacgtggtttaaagagagggtaaaggaaaggggaaaaaacacattttaggagaaagaggtaaaa

SEQ ID NO: 25496 - DNA, 122 bp, Homo sapiens
  misc_feature (61)..(62): /note="This region represents a CpG dinucleotide"
  misc_feature (61)..(61): /note="Nucleotide may be methylated to form 5-methylcytosine"
gttgcgtaagacaaatcattttaaaattaatgccaaaaccacaaaatcactaacctgatacgaaattccagaatgcggcaagaatattacaagctaaattagaaataagaatcctctataca

SEQ ID NO: 25497 - DNA, 122 bp, Homo sapiens
  misc_feature (61)..(62): /note="This region represents a CpG dinucleotide"
  misc_feature (61)..(61): /note="Nucleotide may be methylated to form 5-methylcytosine"
attgcaaaacacaggaaaatgtatgtttcaagaagtgggtgactgtgctgagagttactacgggatcaagtaagataaggacttaagacattctaaggaaattaccagcaagaacatccatg

SEQ ID NO: 25498 - DNA, 122 bp, Homo sapiens
  misc_feature (61)..(62): /note="This region represents a CpG dinucleotide"
  misc_feature (61)..(61): /note="Nucleotide may be methylated to form 5-methylcytosine"
caacatggtgaaaccccgtctctactaaaaatacaaaaattagccaggtgtgatggcacacgccaggaatcccagctacatgggaagcttaggcagaagaattgcttgaacccgggaggcag

SEQ ID NO: 25499 - DNA, 122 bp, Homo sapiens
  misc_feature (61)..(62): /note="This region represents a CpG dinucleotide"
  misc_feature (61)..(61): /note="Nucleotide may be methylated to form 5-methylcytosine"
tcacttcccatggagtggagaaaagcatgctgctctatatttgttccctacaacaggaagcgtgaaaacaggatttgctgccacatgtcaagtactcatgtgcctgtagaagaaaggggcca

SEQ ID NO: 25500 - DNA, 122 bp, Homo sapiens
  misc_feature (61)..(62): /note="This region represents a CpG dinucleotide"
  misc_feature (61)..(61): /note="Nucleotide may be methylated to form 5-methylcytosine"
tgatttcctctatctagtgatctcacttccccatggactctgagagcactttagtggtaacgtgtttatagacttaccacattcttccggatatttgagctgttactgtaacagagtcacga

SEQ ID NO: 25501 - DNA, 122 bp, Homo sapiens
  misc_feature (61)..(62): /note="This region represents a CpG dinucleotide"
  misc_feature (61)..(61): /note="Nucleotide may be methylated to form 5-methylcytosine"
tccctctggtataagaacactcagctctggcaacattttctgcttggatgaggattcttccgatctgtgacttctaactgagatttttatccacagtggggcagtcttggtctctaatgtag

SEQ ID NO: 25502 - DNA, 122 bp, Homo sapiens
  misc_feature (61)..(62): /note="This region represents a CpG dinucleotide"
  misc_feature (61)..(61): /note="Nucleotide may be methylated to form 5-methylcytosine"
ctggctcagccaaagtctataaaatggatttgttccctgcattccctccagggctgcagccgtcaggtaaaggtgggtgcccagtgacacctgtgccagaaagcccaaggggcaggggagac

SEQ ID NO: 25503 - DNA, 122 bp, Homo sapiens
  misc_feature (61)..(62): /note="This region represents a CpG dinucleotide"
  misc_feature (61)..(61): /note="Nucleotide may be methylated to form 5-methylcytosine"
cacagctaggcctctttataaccggcgagtctttttcctttcacacgccatttgcaggcgcgtggcatggtatttgtaactaattttcagtagcaagtgggtcactggtattcacagagtca

SEQ ID NO: 25504 - DNA, 122 bp, Homo sapiens
  misc_feature (61)..(62): /note="This region represents a CpG dinucleotide"
  misc_feature (61)..(61): /note="Nucleotide may be methylated to form 5-methylcytosine"
ggagcctatagtcaatcggaggacaatattaaggccagcttggtgtggggaggagtgccccgtgtggacacatgcctgaaaaatcttaaggagccttgaaaagcagataaaggaacattcat

SEQ ID NO: 25505 - DNA, 122 bp, Homo sapiens
  misc_feature (61)..(62): /note="This region represents a CpG dinucleotide"
  misc_feature (61)..(61): /note="Nucleotide may be methylated to form 5-methylcytosine"
gtctatctaggccggcctccgagggcatggagggagtgggtgcggttgtgaaatgtagtgcgctcaatagtttcctggtgaagtttattttaaaatccgcaccgaagaggaagacgaggacc

SEQ ID NO: 25506 - DNA, 122 bp, Homo sapiens
  misc_feature (61)..(62): /note="This region represents a CpG dinucleotide"
  misc_feature (61)..(61): /note="Nucleotide may be methylated to form 5-methylcytosine"
ctcacaataaaactcaaggaactaagagaacatgaagttcacgtccctcctattagaaagcgggtatacataaaatccatcagtgttgaggttggtaccacagagggctatacccaaagagt

SEQ ID NO: 25507 - DNA, 122 bp, Homo sapiens
  misc_feature (61)..(62): /note="This region represents a CpG dinucleotide"
  misc_feature (61)..(61): /note="Nucleotide may be methylated to form 5-methylcytosine"
aggagtgccaatgagattatacactgttaaaactgattccaggctgggtgcggtggctcacgcctgtaatcctagcactttgggaggcctaggcaggccgattgtctaagctcaggagttcg

SEQ ID NO: 25508 - DNA, 122 bp, Homo sapiens
  misc_feature (61)..(62): /note="This region represents a CpG dinucleotide"
  misc_feature (61)..(61): /note="Nucleotide may be methylated to form 5-methylcytosine"
gatgagccaccagcctcccagtctcaggtggaattcgtgagctggtgcaggtcaggtacccgtggtggtgatgaaacactgatcagaataggcgctcggtgccactgtcacaggagtgcagg

SEQ ID NO: 25509 - DNA, 122 bp, Homo sapiens
  misc_feature (61)..(62): /note="This region represents a CpG dinucleotide"
  misc_feature (61)..(61): /note="Nucleotide may be methylated to form 5-methylcytosine"
ggacccaggaaacaaagcttgtttccttccccttccagtactgtactgtcaccacccacccgaaaccctgtcttaagagacagtggatttgacttaaaggagaccgtctagagctgcttgtg

SEQ ID NO: 25510 - DNA, 122 bp, Homo sapiens
  misc_feature (61)..(62): /note="This region represents a CpG dinucleotide"
  misc_feature (61)..(61): /note="Nucleotide may be methylated to form 5-methylcytosine"
tcctttgctctaagttgtttttccaggaatggagaaaggttactctgagcagttcatactcgccagttgtctgttagtgaataatagcacacatttgagctacttcagggtctgtgagatga

SEQ ID NO: 25511 - DNA, 122 bp, Homo sapiens
  misc_feature (61)..(62): /note="This region represents a CpG dinucleotide"
  misc_feature (61)..(61): /note="Nucleotide may be methylated to form 5-methylcytosine"
ttagatctgaaggtcagactcttgacagggtatgtttgtccgacacttatagggaggagtcggtaattcacaggtggggtgttttatagttggaattgtttttgtgatcaagctgaatctca

SEQ ID NO: 25512 - DNA, 122 bp, Homo sapiens
  misc_feature (61)..(62): /note="This region represents a CpG dinucleotide"
  misc_feature (61)..(61): /note="Nucleotide may be methylated to form 5-methylcytosine"
tatgcacccacaggtatttgacaacaccccagcagccttggacggcacagtggcagctggcgatgagatcaccggtgtcaatggcaggtcaatcaaagggaaaactaaggtggaggtggcga

SEQ ID NO: 25513 - DNA, 122 bp, Homo sapiens
  misc_feature (61)..(62): /note="This region represents a CpG dinucleotide"
  misc_feature (61)..(61): /note="Nucleotide may be methylated to form 5-methylcytosine"
caggacaaccagataaaccacattcctttgacagccttctcaaatctgcgtaagctggaacggctggatatatccaacaaccaactgcggatgctgactcaaggggtttttgataatctctc

SEQ ID NO: 25514 - DNA, 122 bp, Homo sapiens
  misc_feature (61)..(62): /note="This region represents a CpG dinucleotide"
  misc_feature (61)..(61): /note="Nucleotide may be methylated to form 5-methylcytosine"
ccccagaaaggaagaggagggtagtgagcaaacatatcttgcttgttactattgctctcacgttgtgtttcagatggtggaacaacatgtaaaactctacccagtaggtaaacactagacag

SEQ ID NO: 25515 - DNA, 122 bp, Homo sapiens
  misc_feature (61)..(62): /note="This region represents a CpG dinucleotide"
  misc_feature (61)..(61): /note="Nucleotide may be methylated to form 5-methylcytosine"
tgcagacaagcaggaagccatgtgtcataaaattacttgtccttcacgaagccggaggtgcgtggtcacttgccttgaggggcagtgcactctctgcccaactaactcagcaagatcttcct

SEQ ID NO: 25516 - DNA, 122 bp, Homo sapiens
  misc_feature (61)..(62): /note="This region represents a CpG dinucleotide"
  misc_feature (61)..(61): /note="Nucleotide may be methylated to form 5-methylcytosine"
tttgttatcattaccttaactcatacagaaagtagtgtctttgattgggctttgtgttgccggttctggaaaccccagctcttcattcatagacagaaaactggcagcaccaaatcacccat

SEQ ID NO: 25517 - DNA, 122 bp, Homo sapiens
  misc_feature (61)..(62): /note="This region represents a CpG dinucleotide"
  misc_feature (61)..(61): /note="Nucleotide may be methylated to form 5-methylcytosine"
tccaggcctcttgcctgcagggcgttcatccccaccaccatgctgctcaacatgcttacacgtgtctcctggcgccctctgcaagcacgcgttccactcgctggttaagctgagtgttgccc

SEQ ID NO: 25518 - DNA, 122 bp, Homo sapiens
  misc_feature (61)..(62): /note="This region represents a CpG dinucleotide"
  misc_feature (61)..(61): /note="Nucleotide may be methylated to form 5-methylcytosine"
ctgagctgatccctgcaaactcacacaagtttccttccttctccacctcacttcccctcacgctccacacatcctgaaacctatgtgctggtacatgcccaggcatcttccactgtcccagg

SEQ ID NO: 25519 - DNA, 122 bp, Homo sapiens
  misc_feature (61)..(62): /note="This region represents a CpG dinucleotide"
  misc_feature (61)..(61): /note="Nucleotide may be methylated to form 5-methylcytosine"
cttgctcagagtcacactaccagactgcaaactcaggtgctttttattatgcagaatacccgctgcagacctaatcctgccccaggctctggggccagctttgttcgcagggagattttaag

SEQ ID NO: 25520 - DNA, 122 bp, Homo sapiens
  misc_feature (61)..(62): /note="This region represents a CpG dinucleotide"
  misc_feature (61)..(61): /note="Nucleotide may be methylated to form 5-methylcytosine"
ctcatatgtgcttattttgtctcccagttacactgtgagctgcttcagggcagggcccagcgttgcacggtaaaactacattaattcagactcattaattcagagcctataatagttcagac

SEQ ID NO: 25521 - DNA, 122 bp, Homo sapiens
  misc_feature (61)..(62): /note="This region represents a CpG dinucleotide"
  misc_feature (61)..(61): /note="Nucleotide may be methylated to form 5-methylcytosine"
tagcaaatggaagcaatgggtcccaggagttcgtttctgtatgcggctctaactctgccacgaaggccaggacagatagtgtgcagtgctctgtcatgtctaccagagaaaatgatgcaaca

SEQ ID NO: 25522 - DNA, 122 bp, Homo sapiens
  misc_feature (61)..(62): /note="This region represents a CpG dinucleotide"
  misc_feature (61)..(61): /note="Nucleotide may be methylated to form 5-methylcytosine"
tcattccttcctctcccaaatagagaagccttggcttgaaaattccagggagtggccatgcgaggtggctcatgcctgtaatcctagccctttgggaagccaaggtgggtaggtcacttgag

SEQ ID NO: 25523 - DNA, 122 bp, Homo sapiens
  misc_feature (61)..(62): /note="This region represents a CpG dinucleotide"
  misc_feature (61)..(61): /note="Nucleotide may be methylated to form 5-methylcytosine"
gcagaatcagtgtcacctgggatcttggtagaaacacaaatacttgagtgccatctcagacgtactgaatcagtttcttcaggggtagggtccaggaatatgcattttatgaaggcctctaa

SEQ ID NO: 25524 - DNA, 122 bp, Homo sapiens
  misc_feature (61)..(62): /note="This region represents a CpG dinucleotide"
  misc_feature (61)..(61): /note="Nucleotide may be methylated to form 5-methylcytosine"
ttaggtttgatctgatgaacaatggataatcactgcaggctcctcagcagggaagatatacgaaggaagaaaaggcatttaagtggattaatctagcccacgtgaacaactggttcaacgtg

SEQ ID NO: 25525 - DNA, 122 bp, Homo sapiens
  misc_feature (61)..(62): /note="This region represents a CpG dinucleotide"
  misc_feature (61)..(61): /note="Nucleotide may be methylated to form 5-methylcytosine"
ctcagggccggggtggtgctcagaaacactgtctttatgatatacatgggcttttgagctcgtggcttgtggttgtggactgagaaaattgcttcctgggtttatagagatggtaggggaaa

SEQ ID NO: 25526 - DNA, 122 bp, Homo sapiens
  misc_feature (61)..(62): /note="This region represents a CpG dinucleotide"
  misc_feature (61)..(61): /note="Nucleotide may be methylated to form 5-methylcytosine"
taacaggcccaggagccccaagtttatgttggaacctcaagagcagaggatcactcaactcgtaggtatttgatggcacaaacttatggctgggctcgactttaaaaaagtcttatctgaga

SEQ ID NO: 25527 - DNA, 122 bp, Homo sapiens
  misc_feature (61)..(62): /note="This region represents a CpG dinucleotide"
  misc_feature (61)..(61): /note="Nucleotide may be methylated to form 5-methylcytosine"
taacagtgattcacatattacacatttcagtgtctgtcttgtttcctgcatttctctcttcgttagtgcatcaagacacatttattaacgacacatcatatgccttccgggccccgtgttag

SEQ ID NO: 25528 - DNA, 122 bp, Homo sapiens
  misc_feature (61)..(62): /note="This region represents a CpG dinucleotide"
  misc_feature (61)..(61): /note="Nucleotide may be methylated to form 5-methylcytosine"
actactgacattttcgtttctgccccaagaggatgacagttgaacaaaaccttgaagtcccgatgtacctctgacaactcccagtcagctacatccttgggataattttatttttcccttaa

SEQ ID NO: 25529 - DNA, 122 bp, Homo sapiens
  misc_feature (61)..(62): /note="This region represents a CpG dinucleotide"
  misc_feature (61)..(61): /note="Nucleotide may be methylated to form 5-methylcytosine"
aggtgcaaaacaatgaattccaagcctcggaagcaaagaagcttaggatccgacggtggccgcaagatctcatcatggatctgacccctgctcagcgcgcgccatttcgtcgttgccaaacg

SEQ ID NO: 25530 - DNA, 122 bp, Homo sapiens
  misc_feature (61)..(62): /note="This region represents a CpG dinucleotide"
  misc_feature (61)..(61): /note="Nucleotide may be methylated to form 5-methylcytosine"
ctgagtgctgggtggtcccgcggaaagtgcctggggctctgcagggctctcaagagaccgcgtgcggcctgggggcctggctctgggggctgccatccgggatcagaaaatgtcccagagga

SEQ ID NO: 25531 - DNA, 122 bp, Homo sapiens
  misc_feature (61)..(62): /note="This region represents a CpG dinucleotide"
  misc_feature (61)..(61): /note="Nucleotide may be methylated to form 5-methylcytosine"
ccttaggattataatttcactagagtatgcaaatcatagcagacatcatggccattctatcgtgtggaacagaaaactctttgagtaatgaagatgattcataggaaccatagaacttaatc

SEQ ID NO: 25532 - DNA, 122 bp, Homo sapiens
  misc_feature (61)..(62): /note="This region represents a CpG dinucleotide"
  misc_feature (61)..(61): /note="Nucleotide may be methylated to form 5-methylcytosine"
gagagatgggaagaggttccagctcggaggggtggggcctgaagggctgccccccacctccgagagccctcagaataggtaggagtcatgctgctcctagatatctagtgtgaggtcaggct

SEQ ID NO: 25533 - DNA, 122 bp, Homo sapiens
  misc_feature (61)..(62): /note="This region represents a CpG dinucleotide"
  misc_feature (61)..(61): /note="Nucleotide may be methylated to form 5-methylcytosine"
tattgttcttcttctaacaaggaagaaacagagtgactctacagggtcatgcagttttcacgtggcctctagacacccactcgacagtggcatagatgctagatgcccactcgccagtggtg

SEQ ID NO: 25534 - DNA, 122 bp, Homo sapiens
  misc_feature (61)..(62): /note="This region represents a CpG dinucleotide"
  misc_feature (61)..(61): /note="Nucleotide may be methylated to form 5-methylcytosine"
aagcatgaattttggagtcaagacaggccctggtcaaatcctggggcagtgcagcaccttcgttggatagctctgagcaattgacttaatctttctaagccccagtttcctcatctgtgaag

SEQ ID NO: 25535 - DNA, 122 bp, Homo sapiens
  misc_feature (61)..(62): /note="This region represents a CpG dinucleotide"
  misc_feature (61)..(61): /note="Nucleotide may be methylated to form 5-methylcytosine"
taagtactcacctttaaatctctattgattggcagcttcctgaaatacagagtcagagagcgtgtccaccacgtcctgagtttggtaccaacccaggtgctgatggaaattccaagtaggga

SEQ ID NO: 25536 - DNA, 122 bp, Homo sapiens
  misc_feature (61)..(62): /note="This region represents a CpG dinucleotide"
  misc_feature (61)..(61): /note="Nucleotide may be methylated to form 5-methylcytosine"
agagtgttgggaagttgtcaagactctgttcttcaagactttgcttggttgtcagctccccggaaactcttggctgactcacctgaggtgaggtccagaccttcctgtgtgctctcacagcc

SEQ ID NO: 25537 - DNA, 122 bp, Homo sapiens
  misc_feature (61)..(62): /note="This region represents a CpG dinucleotide"
  misc_feature (61)..(61): /note="Nucleotide may be methylated to form 5-methylcytosine"
aaagcataagatataaaaaagggaataacccagaaaagcccaacaccaataaccgttacacgaaacaaaggaagtaaagaaggagaagctgaattcacaccctttgaagaagggggacaatt

SEQ ID NO: 25538 - DNA, 122 bp, Homo sapiens
  misc_feature (61)..(62): /note="This region represents a CpG dinucleotide"
  misc_feature (61)..(61): /note="Nucleotide may be methylated to form 5-methylcytosine"
ctggtgcccgcctgcaggctgctcgcttgctgagaggcggcgtgccagctccgcgcaccgcgcctcagtgccagatcagggagctgtcagctcagcgcccacgcccctccgcttcagctccg

SEQ ID NO: 25539 - DNA, 122 bp, Homo sapiens
  misc_feature (61)..(62): /note="This region represents a CpG dinucleotide"
  misc_feature (61)..(61): /note="Nucleotide may be methylated to form 5-methylcytosine"
cttggttctttccacaggtccctgagaacaatggaaataactcgtggccccacaatgacacggagattgccaacagcacacccaacccgaagcctgcagccagcagcccggaaacaccctct

SEQ ID NO: 25540 - DNA, 122 bp, Homo sapiens
  misc_feature (61)..(62): /note="This region represents a CpG dinucleotide"
  misc_feature (61)..(61): /note="Nucleotide may be methylated to form 5-methylcytosine"
cacactgccaggcttctttcggctgagctggtggggctcctctgcttcctcctttccttgcgctcaatcgctgtgctctcatcagcagctaggagcagcagtgcattcttttcttccctctc

SEQ ID NO: 25541 - DNA, 122 bp, Homo sapiens
  misc_feature (61)..(62): /note="This region represents a CpG dinucleotide"
  misc_feature (61)..(61): /note="Nucleotide may be methylated to form 5-methylcytosine"
atctgatagctgaggtggccactaagtgactgataggcagcataaacacagcacaaatgccgggcaaagggatgaatcatgtcccaggaggaacccagtgggatgacgtgtgatttcatcac

SEQ ID NO: 25542 - DNA, 122 bp, Homo sapiens
  misc_feature (61)..(62): /note="This region represents a CpG dinucleotide"
  misc_feature (61)..(61): /note="Nucleotide may be methylated to form 5-methylcytosine"
ctacgaccttcctgcttccatgctagctgcaattcaggaatggcctcaggggcacttacacgttgccaccatcaatgacaacaccgtgaaattggtctcattgttgccatttcacacgtggg

SEQ ID NO: 25543 - DNA, 122 bp, Homo sapiens
  misc_feature (61)..(62): /note="This region represents a CpG dinucleotide"
  misc_feature (61)..(61): /note="Nucleotide may be methylated to form 5-methylcytosine"
gcacagagtttactaaaccctttcacatccattaagtcatttgaggcaatattattacctcgtttttacagatgggagaactgaacttcaaaaaagtgtaaggggctgagagcagtggctca

SEQ ID NO: 25544 - DNA, 122 bp, Homo sapiens
  misc_feature (61)..(62): /note="This region represents a CpG dinucleotide"
  misc_feature (61)..(61): /note="Nucleotide may be methylated to form 5-methylcytosine"
cttagtgcatattggcatcttacctgactccctcctccctctcccgtcctaactgaaagacgctacagtgtttgctgaatagttattttaattcctgagcacctgagattggccacctcgag

SEQ ID NO: 25545 - DNA, 122 bp, Homo sapiens
  misc_feature (61)..(62): /note="This region represents a CpG dinucleotide"
  misc_feature (61)..(61): /note="Nucleotide may be methylated to form 5-methylcytosine"
aaagaaatggaaattatctgaatgcctgacaaagggggattggttaattaaatcacagtacgtctactcaagggaatattgtgtggccattaatctatgacttagaacagggattgtagata

SEQ ID NO: 25546 - DNA, 122 bp, Homo sapiens
  misc_feature (61)..(62): /note="This region represents a CpG dinucleotide"
  misc_feature (61)..(61): /note="Nucleotide may be methylated to form 5-methylcytosine"
gcagattttgttttatgtccatcagggagccagtgaggtgtataaagcagaagagtgacacggtctgattggcaattttaaaaggtcactattgctactgcatggagcctggactagaaaga

SEQ ID NO: 25547 - DNA, 122 bp, Homo sapiens
  misc_feature (61)..(62): /note="This region represents a CpG dinucleotide"
  misc_feature (61)..(61): /note="Nucleotide may be methylated to form 5-methylcytosine"
tgttcctcagagcaggcagtgcaggctatgggattccccaggacggagaggcctctgccccggctgcttgatgcaaggctcagagaggccactaggtttctaccatgtgctgtctcaggcaa

SEQ ID NO: 25548 - DNA, 122 bp, Homo sapiens
  misc_feature (61)..(62): /note="This region represents a CpG dinucleotide"
  misc_feature (61)..(61): /note="Nucleotide may be methylated to form 5-methylcytosine"
caagcatacagacaagcacacacagattctatttcagatgcctgccttctagtcacttatcgtagagagaggatttatttctttgaatttgttgttttagaattgcatacaacttcttaagg

SEQ ID NO: 25549 - DNA, 122 bp, Homo sapiens
  misc_feature (61)..(62): /note="This region represents a CpG dinucleotide"
  misc_feature (61)..(61): /note="Nucleotide may be methylated to form 5-methylcytosine"
tgctgggcgggcgtgtttatttgtccttgggtacatgaagcaatagctccgttgctcctccgtgagagattgcagaatgttctggctggaataaccagtcaaggtagtgtcagaagacagag

SEQ ID NO: 25550 - DNA, 122 bp, Homo sapiens
  misc_feature (61)..(62): /note="This region represents a CpG dinucleotide"
  misc_feature (61)..(61): /note="Nucleotide may be methylated to form 5-methylcytosine"
aagctgaagatggtgggtaagtggtggatagcagctatagaagtcagaagggagagaaagcgagacaaacagctgctcttgtcagcatggggataagtgtaaagagattaatagttatttga

SEQ ID NO: 25551 - DNA, 122 bp, Homo sapiens
  misc_feature (61)..(62): /note="This region represents a CpG dinucleotide"
  misc_feature (61)..(61): /note="Nucleotide may be methylated to form 5-methylcytosine"
aggtgatttcatcactgtgtgaacatcagagtgcacttacacaaacctggatgggtagcccgcaacacagctaggctagatggtacagctgattgctcccacaccacaagcctgtatggcag

SEQ ID NO: 25552 - DNA, 122 bp, Homo sapiens
  misc_feature (61)..(62): /note="This region represents a CpG dinucleotide"
  misc_feature (61)..(61): /note="Nucleotide may be methylated to form 5-methylcytosine"
ctgttccgtatcagagcagtgaggacttcctcctcctttcttggctggaaagtgttccatcgtcatatggaaatcttgtggtcgatttaacccgttccctattgatagacgctgtgtgggct

SEQ ID NO: 25553 - DNA, 122 bp, Homo sapiens
  misc_feature (61)..(62): /note="This region represents a CpG dinucleotide"
  misc_feature (61)..(61): /note="Nucleotide may be methylated to form 5-methylcytosine"
ttctatttgccagagtgggggagggagtggtaaggcaggttgactgggatagaccagtcacgaaggagctggaacattcacccaggccaattgccatgtgacttgtagaaggtctgtgggga

SEQ ID NO: 25554 - DNA, 122 bp, Homo sapiens
  misc_feature (61)..(62): /note="This region represents a CpG dinucleotide"
  misc_feature (61)..(61): /note="Nucleotide may be methylated to form 5-methylcytosine"
gcagctgaatgactacgtggacatcatctgtccgcactatgaagatcactctgtggcagacgctgccatggagcagtacatactgtacctggtggagcatgaggagtaccagctgtgccagc

SEQ ID NO: 25555 - DNA, 122 bp, Homo sapiens
  misc_feature (61)..(62): /note="This region represents a CpG dinucleotide"
  misc_feature (61)..(61): /note="Nucleotide may be methylated to form 5-methylcytosine"
ccggccaagtgtccatccctgtgtcaaatggatggaatgccaggtaatccttgtactccccgtcaatcagtttggcggcattgttcctggcaaaccagcagtctatctgctcttccccgttg

SEQ ID NO: 25556 - DNA, 122 bp, Homo sapiens
  misc_feature (61)..(62): /note="This region represents a CpG dinucleotide"
  misc_feature (61)..(61): /note="Nucleotide may be methylated to form 5-methylcytosine"
ggaattgattgagctggctgcacttgtgtaccaggatgcagagttctccaggtagctggacgctggggactggttggaggtcggagggtgggcatgagggtggtggctgagcgagcgggacg

SEQ ID NO: 25557 - DNA, 122 bp, Homo sapiens
  misc_feature (61)..(62): /note="This region represents a CpG dinucleotide"
  misc_feature (61)..(61): /note="Nucleotide may be methylated to form 5-methylcytosine"
ctaagcaaccaaaaattgagattcctgtgtatcaaaaatgccaaccttctcttcagactccgtatacttcctaagccatgtcactgtatcaggtgtcagggctctcgtgcccagcaaatgcc

SEQ ID NO: 25558 - DNA, 122 bp, Homo sapiens
  misc_feature (61)..(62): /note="This region represents a CpG dinucleotide"
  misc_feature (61)..(61): /note="Nucleotide may be methylated to form 5-methylcytosine"
cctaagtcctatgcatctttatgctaccccatgagggagcagctgcaagtcatgaacacacgtccatcatgcagcatcatgggtgtggcacccaaaggatgagctggaaaatgaaacattat

SEQ ID NO: 25559 - DNA, 122 bp, Homo sapiens
  misc_feature (61)..(62): /note="This region represents a CpG dinucleotide"
  misc_feature (61)..(61): /note="Nucleotide may be methylated to form 5-methylcytosine"
gcctgcacattcttctctcccttcatctctgtctcttcagtctgagaagttagtctgaggcgtgactgctgcatcatcaatgactgcgttagaaaccccagcgattcactgctatgttcttt

SEQ ID NO: 25560 - DNA, 122 bp, Homo sapiens
  misc_feature (61)..(62): /note="This region represents a CpG dinucleotide"
  misc_feature (61)..(61): /note="Nucleotide may be methylated to form 5-methylcytosine"
aaggcaacagctgttcttgtggccactcagttggagccattgtctaggtggctattcaagcgtaagggggaacttttatttgcttcttacataactttcagctctgtcatccattttactca

SEQ ID NO: 25561 - DNA, 122 bp, Homo sapiens
  misc_feature (61)..(62): /note="This region represents a CpG dinucleotide"
  misc_feature (61)..(61): /note="Nucleotide may be methylated to form 5-methylcytosine"
gacctcatgtgggagttgagtagtcattactcactggggccagtctcttcttgaaccctacgttctcacgtcggaacatgctcctgttattttacagtctcacactatccacagtgtaaaca

SEQ ID NO: 25562 - DNA, 122 bp, Homo sapiens
  misc_feature (61)..(62): /note="This region represents a CpG dinucleotide"
  misc_feature (61)..(61): /note="Nucleotide may be methylated to form 5-methylcytosine"
ttgggggtcattatggtttctgtttcaacttggtattcctcttacttccctccactagttcgatatctagtacagaatcttatatgctagcacagaagcctgtttccattaaattttgttga

SEQ ID NO: 25563 - DNA, 122 bp, Homo sapiens
  misc_feature (61)..(62): /note="This region represents a CpG dinucleotide"
  misc_feature (61)..(61): /note="Nucleotide may be methylated to form 5-methylcytosine"
tattgcaccatctcctcctatatgctgtgctatgagctgtgagtttctgctcaaggtgctcgagaaacagcaacaaggaaaacaaaaacctagttttcctggagcttacatgcaagtagggg

SEQ ID NO: 25564 - DNA, 122 bp, Homo sapiens
  misc_feature (61)..(62): /note="This region represents a CpG dinucleotide"
  misc_feature (61)..(61): /note="Nucleotide may be methylated to form 5-methylcytosine"
gggtcttgattctgtgactccaccaggtgtcaaggtctctgaaccggctgcccttagacacgtgcctgaactcaaagcagtcatactgttaagggatagacttggtgctgtaaacttagcca

SEQ ID NO: 25565 - DNA, 122 bp, Homo sapiens
  misc_feature (61)..(62): /note="This region represents a CpG dinucleotide"
  misc_feature (61)..(61): /note="Nucleotide may be methylated to form 5-methylcytosine"
agcctgcctcctttggagagcccttgagcatcactgttgtgaccggggtgcacacctgggcgactccttgatcattcgtgcattctggtcaagttgacccgataagccaaaagtacttttca

SEQ ID NO: 25566 - DNA, 122 bp, Homo sapiens
  misc_feature (61)..(62): /note="This region represents a CpG dinucleotide"
  misc_feature (61)..(61): /note="Nucleotide may be methylated to form 5-methylcytosine"
tactgaacattttgagaaatgcaataatttcttaaatgcaatgatttctcagtgatgtggcgcattcctgtgctggaaaaagcatgtgtgaacccatgggctgtcacctagactgatatgac

SEQ ID NO: 25567 - DNA, 122 bp, Homo sapiens
  misc_feature (61)..(62): /note="This region represents a CpG dinucleotide"
  misc_feature (61)..(61): /note="Nucleotide may be methylated to form 5-methylcytosine"
ctatctccatgaattaatctttagaagtaggatgtgggaaatgatataaagggagccttccgccctatagaacagaagtaagacaacagttggattctgaaagccagacaaggccccaggac

SEQ ID NO: 25568 - DNA, 122 bp, Homo sapiens
  misc_feature (61)..(62): /note="This region represents a CpG dinucleotide"
  misc_feature (61)..(61): /note="Nucleotide may be methylated to form 5-methylcytosine"
gatctggtcatttaaaagtgtgtagcacctccccctatctctcttgctcctgctctgccacgtagaagtgcctgcttccgcattgccttctgccatgatcataagtttcctgaggcctctcc

SEQ ID NO: 25569 - DNA, 122 bp, Homo sapiens
  misc_feature (61)..(62): /note="This region represents a CpG dinucleotide"
  misc_feature (61)..(61): /note="Nucleotide may be methylated to form 5-methylcytosine"
gcaggataggatgactctgtgattattctgggactcaggctgaagggaaagtgcttctcacggtgatgatgttagtcactagagggtatgcccaaccacataagtgcatttcaaatctatcc

SEQ ID NO: 25570 - DNA, 122 bp, Homo sapiens
  misc_feature (61)..(62): /note="This region represents a CpG dinucleotide"
  misc_feature (61)..(61): /note="Nucleotide may be methylated to form 5-methylcytosine"
gactagaatagccagctgtgtcagagagctttaacagaaataaaaaaaatcaaaagcttgcgtcacttaatgactctactggctttggactgttctgccaagatcaacgttgcctcacttct

SEQ ID NO: 25571 - DNA, 122 bp, Homo sapiens
  misc_feature (61)..(62): /note="This region represents a CpG dinucleotide"
  misc_feature (61)..(61): /note="Nucleotide may be methylated to form 5-methylcytosine"
tgcgttcccggcactgagccaggtccacaacaagcactcagaagaaactgactgaatgaacgtgtgatttatgacgatatacattcacctgagcgaatgctcagagaatacaattagaagca

SEQ ID NO: 25572 - DNA, 122 bp, Homo sapiens
  misc_feature (61)..(62): /note="This region represents a CpG dinucleotide"
  misc_feature (61)..(61): /note="Nucleotide may be methylated to form 5-methylcytosine"
tgcgcaggatctgcgagggcctgggccggatgctggacgagggcagcctctgaaccccggcgccgcccaaccgcgcccctcgcgccttttggggctctcctgctgggcgcgggtggggtttg

SEQ ID NO: 25573 - DNA, 122 bp, Homo sapiens
  misc_feature (61)..(62): /note="This region represents a CpG dinucleotide"
  misc_feature (61)..(61): /note="Nucleotide may be methylated to form 5-methylcytosine"
agagatgactcacctgcatgtcatactctatttcatcctcagagcaaccctatgaggtcacgccattcacaggtgaggagcccagctcagagaggctaagtcatttgtctgtgggtacatag

SEQ ID NO: 25574 - DNA, 122 bp, Homo sapiens
  misc_feature (61)..(62): /note="This region represents a CpG dinucleotide"
  misc_feature (61)..(61): /note="Nucleotide may be methylated to form 5-methylcytosine"
gatttctcctttcctctgccttgttgttctatgtgggcccccagctgattggatggtgcccgcctacattgagggcagatctttcccactcggtccactgactcacatgccagtctcctctg

SEQ ID NO: 25575 - DNA, 122 bp, Homo sapiens
  misc_feature (61)..(62): /note="This region represents a CpG dinucleotide"
  misc_feature (61)..(61): /note="Nucleotide may be methylated to form 5-methylcytosine"
tgcagataaaccagagactactcataaccgtgtactttttttttcccccatttctgatcccgtctcaacggaaggatgtaattgaggaagggcttgattggccagtgagtcttgaagctgac

SEQ ID NO: 25576 - DNA, 122 bp, Homo sapiens
  misc_feature (61)..(62): /note="This region represents a CpG dinucleotide"
  misc_feature (61)..(61): /note="Nucleotide may be methylated to form 5-methylcytosine"
ctggttgtactagtcaaataacttgtagtcgtttgtgactcatcttgcttcctgtaccatcgctaaggtccacagatactccttgcaaaatatacccataatctcttcatttctctccacct

SEQ ID NO: 25577 - DNA, 122 bp, Homo sapiens
  misc_feature (61)..(62): /note="This region represents a CpG dinucleotide"
  misc_feature (61)..(61): /note="Nucleotide may be methylated to form 5-methylcytosine"
gatggtctccatctcatgacctcctgatctgcctgcctcccagagtgctgggattacaggcgtgagccaccacacctggccgggtagggtgtaatttccaaagttgacctcacgttgaacct

SEQ ID NO: 25578 - DNA, 122 bp, Homo sapiens
  misc_feature (61)..(62): /note="This region represents a CpG dinucleotide"
  misc_feature (61)..(61): /note="Nucleotide may be methylated to form 5-methylcytosine"
ttatttacttacaccctgctttattccagaaaagattggaggctgcttttgtgtaacattcggattcactccatgagatattttgatctaaatgatacccacatgagagaagcatggcaaag

SEQ ID NO: 25579 - DNA, 122 bp, Homo sapiens
  misc_feature (61)..(62): /note="This region represents a CpG dinucleotide"
  misc_feature (61)..(61): /note="Nucleotide may be methylated to form 5-methylcytosine"
gctctgtgggaggaccccagccaggtgggatccctgattcaggagtgaattcagctcagccgtgtaaggggctccagacccaactcccatgctgggctgggcctcttcccctccttctggag

SEQ ID NO: 25580 - DNA, 122 bp, Homo sapiens
  misc_feature (61)..(62): /note="This region represents a CpG dinucleotide"
  misc_feature (61)..(61): /note="Nucleotide may be methylated to form 5-methylcytosine"
ttccctgttctctcagaggctagattgctgaacctgatcggtaagaggcagtctgtgtgacggcacaggactaggatggccactgagtcatcctgagcaagttatctgacctctctgggcct

SEQ ID NO: 25581 - DNA, 122 bp, Homo sapiens
  misc_feature (61)..(62): /note="This region represents a CpG dinucleotide"
  misc_feature (61)..(61): /note="Nucleotide may be methylated to form 5-methylcytosine"
ccttttatttctttttcttgcctaatcatcctgatagaatctctagtacaagtaagtagacgtggcaagaactgatatatttgtcttatttgagagctgaggagtatttttatgcaatctga

SEQ ID NO: 25582 - DNA, 122 bp, Homo sapiens
  misc_feature (61)..(62): /note="This region represents a CpG dinucleotide"
  misc_feature (61)..(61): /note="Nucleotide may be methylated to form 5-methylcytosine"
tactgcagatacctcaacaaatgatctgataaccaagacggctcctaagtgagtaacaggcgggaagtgtctacaacatgaatatgttggataaagggatgattcatgacccaggcaggaaa

SEQ ID NO: 25583 - DNA, 122 bp, Homo sapiens
  misc_feature (61)..(62): /note="This region represents a CpG dinucleotide"
  misc_feature (61)..(61): /note="Nucleotide may be methylated to form 5-methylcytosine"
tccttccttatggtaacaatgacttcctgatccacctttgtctatgaagcttggctgccacgcatgagtctcactttgatggacagttattgacaggtcttcttctgagaattactgttctg

SEQ ID NO: 25584 - DNA, 122 bp, Homo sapiens
  misc_feature (61)..(62): /note="This region represents a CpG dinucleotide"
  misc_feature (61)..(61): /note="Nucleotide may be methylated to form 5-methylcytosine"
gttcccagaggcctaggggcaagaccatgtcttcacacgtcgggcagcgtgcattgtcagcgctctatgaaaaacaaatagcagttatgcaaagacaaggaagctgctggctcatggaggct

SEQ ID NO: 25585 - DNA, 122 bp, Homo sapiens
  misc_feature (61)..(62): /note="This region represents a CpG dinucleotide"
  misc_feature (61)..(61): /note="Nucleotide may be methylated to form 5-methylcytosine"
cctggagccagaatctggaagaggctgggaagcattctcccccagcgccttcgaagggagcgtggccctgctgacaacttggtcagacttccggcctccagaactgtaaaagaatacttttc

SEQ ID NO: 25586 - DNA, 122 bp, Homo sapiens
  misc_feature (61)..(62): /note="This region represents a CpG dinucleotide"
  misc_feature (61)..(61): /note="Nucleotide may be methylated to form 5-methylcytosine"
ccctgccccacccttctaagagggcaaattttgtctaactccatcctctcagaatcagagcgcctcaaagcaaagagggacttccttcctcatcttatttccttctctgggagcctctggga

SEQ ID NO: 25587 - DNA, 122 bp, Homo sapiens
  misc_feature (61)..(62): /note="This region represents a CpG dinucleotide"
  misc_feature (61)..(61): /note="Nucleotide may be methylated to form 5-methylcytosine"
attgcagttctgttggtggactttaactagtgttccagccatagctggtcatctatgccgcgctgccccagagagagggtgcgagggctaatgggttagtcatgcccctgtaaaggtgacca

SEQ ID NO: 25588 - DNA, 122 bp, Homo sapiens
  misc_feature (61)..(62): /note="This region represents a CpG dinucleotide"
  misc_feature (61)..(61): /note="Nucleotide may be methylated to form 5-methylcytosine"
tgtccttcattcatggtaaaagccctaatagcctcagtgttagaatatcctgtaggcaggcgaaggatgacatgactcactttggtggtgacctcctagtagttcaactgagaatccaggcg

SEQ ID NO: 25589 - DNA, 122 bp, Homo sapiens
  misc_feature (61)..(62): /note="This region represents a CpG dinucleotide"
  misc_feature (61)..(61): /note="Nucleotide may be methylated to form 5-methylcytosine"
caccatgtggggtgggaacgtagctgaatttccacaaggaagaaaaaaaatatggatggacgtcaaaaggctcaattaattacaggctagtgaaacgatgcgagacacaaaggcatctcaat

SEQ ID NO: 25590 - DNA, 122 bp, Homo sapiens
  misc_feature (61)..(62): /note="This region represents a CpG dinucleotide"
  misc_feature (61)..(61): /note="Nucleotide may be methylated to form 5-methylcytosine"
gtcagggcctaagggtccaggaatcactgtctaccttaggagtttgttaataaatcgccacggtgagttgggtaatgtttgagagcaaaatgaaataaaatgtcctatatgtgtttaagcta

SEQ ID NO: 25591 - DNA, 122 bp, Homo sapiens
  misc_feature (61)..(62): /note="This region represents a CpG dinucleotide"
  misc_feature (61)..(61): /note="Nucleotide may be methylated to form 5-methylcytosine"
tcgactccccattgcactcagcagatgtggccaccttccagtatcactgactcagacacacgcacccagcccttgcccagggtgcaagcctgccttcaggaaggatgactgcacccaggctg

SEQ ID NO: 25592 - DNA, 122 bp, Homo sapiens
  misc_feature (61)..(62): /note="This region represents a CpG dinucleotide"
  misc_feature (61)..(61): /note="Nucleotide may be methylated to form 5-methylcytosine"
gaccctcattacggcattaggatgggattaccttgctctcttctgaaatactagcttatccgtggcaccagcaacaaatacaagcagcttgtctgatggaaaggtcctctacttaagaacta

SEQ ID NO: 25593 - DNA, 122 bp, Homo sapiens
  misc_feature (61)..(62): /note="This region represents a CpG dinucleotide"
  misc_feature (61)..(61): /note="Nucleotide may be methylated to form 5-methylcytosine"
aagaaacacgtgtggcctcactgggtgactgcctgggcattggcaatcaagtttactttgcgtcatttttacttcctttttcagatttatttttagtaaacaaaagtgaaaaaagagaaaga

SEQ ID NO: 25594 - DNA, 122 bp, Homo sapiens
  misc_feature (61)..(62): /note="This region represents a CpG dinucleotide"
  misc_feature (61)..(61): /note="Nucleotide may be methylated to form 5-methylcytosine"
ttttggcagaacaaaagcccttgtcttagaactgttggcagccgtttgtcttgtcagaggcgggcatgaaatcattttatcagcatttgataactttaaagaggtaggctacactatagttt

SEQ ID NO: 25595 - DNA, 122 bp, Homo sapiens
  misc_feature (61)..(62): /note="This region represents a CpG dinucleotide"
  misc_feature (61)..(61): /note="Nucleotide may be methylated to form 5-methylcytosine"
agtgtagcgtcagacacatgcctcagtcccacctcacgtccccatccgtgagtccagcaacgacccaccagccgcataaatcagaggccagggaagtcgagctggcggctgggtttggaaca

SEQ ID NO: 25596 - DNA, 122 bp, Homo sapiens
  misc_feature (61)..(62): /note="This region represents a CpG dinucleotide"
  misc_feature (61)..(61): /note="Nucleotide may be methylated to form 5-methylcytosine"
gtgtttcccaaacaaaacgtttaccttatttgaatgatcagataaagggcagtaaaattacgtgatatatgtgaaagtgctttgtaaaccatgacaattgattaatggaatcagatatgtac

SEQ ID NO: 25597 - DNA, 122 bp, Homo sapiens
  misc_feature (61)..(62): /note="This region represents a CpG dinucleotide"
  misc_feature (61)..(61): /note="Nucleotide may be methylated to form 5-methylcytosine"
cggaaatccacccagccatgctgtctttggagaaaggcaggctgcactcgggagcaggcacgctgccccaggccagccttgcagggactttcaatacagtttgtcgggttaggaaagaacac

SEQ ID NO: 25598 - DNA, 122 bp, Homo sapiens
  misc_feature (61)..(62): /note="This region represents a CpG dinucleotide"
  misc_feature (61)..(61): /note="Nucleotide may be methylated to form 5-methylcytosine"
taaaaaaaaaaaaaaaaaaaaaaacactgcaggccccaccacatcctgctttactcctgacgtccctagaatgtggggacccagtggtagtcggctgagcataggattggaagtcagagggc

SEQ ID NO: 25599 - DNA, 122 bp, Homo sapiens
  misc_feature (61)..(62): /note="This region represents a CpG dinucleotide"
  misc_feature (61)..(61): /note="Nucleotide may be methylated to form 5-methylcytosine"
gggggagcacccctatacaatgacatacacccatgtctttctctcatacacacacacacacgcacacttaatgtagtagttgctggcgagagcctttgactctgaaccccacctgaacccgt

SEQ ID NO: 25600 - DNA, 122 bp, Homo sapiens
  misc_feature (61)..(62): /note="This region represents a CpG dinucleotide"
  misc_feature (61)..(61): /note="Nucleotide may be methylated to form 5-methylcytosine"
ggaaccaaagcagtaaacatgtcaagtaaccattgtagtgcccagtggctagaacacacccgacccatagtagacactcaatgtttcattaaagaaagaataaatgcatgggcttctctatt

SEQ ID NO: 25601 - DNA, 122 bp, Homo sapiens
  misc_feature (61)..(62): /note="This region represents a CpG dinucleotide"
  misc_feature (61)..(61): /note="Nucleotide may be methylated to form 5-methylcytosine"
ggctaagacaagccttggaacaaaatcactttgtgggttattgagaggtcagtggattgacgcgttgtaatcagaaaagcagttgaagatccactgtgagttaaggcagagggtagaggaga

SEQ ID NO: 25602 - DNA, 122 bp, Homo sapiens
  misc_feature (61)..(62): /note="This region represents a CpG dinucleotide"
  misc_feature (61)..(61): /note="Nucleotide may be methylated to form 5-methylcytosine"
ctgaaactcagactcttcttggaccttgagctggctggcttttagtctagaactacacatcggttctcctaaatctccaggttgctaattgcagatcttgggacttctgagcctccaataat

SEQ ID NO: 25603 - DNA, 122 bp, Homo sapiens
  misc_feature (61)..(62): /note="This region represents a CpG dinucleotide"
  misc_feature (61)..(61): /note="Nucleotide may be methylated to form 5-methylcytosine"
atttgccagtaaatttgctgagtctcaactgctctccacacattctggtgagtgcaggaacgcatgagctctgcttcccttcagctgagtcacttcagagggcagggctcctttgttggaga

SEQ ID NO: 25604 - DNA, 122 bp, Homo sapiens
  misc_feature (61)..(62): /note="This region represents a CpG dinucleotide"
  misc_feature (61)..(61): /note="Nucleotide may be methylated to form 5-methylcytosine"
tctttctagcctttttttcctacatgccagtgtgtatgtaagtatccattcattttaaagcgaacaaatgaataagccagccagacagtgcagacaggaaagcagctgttaattgcccatgg

SEQ ID NO: 25605 - DNA, 122 bp, Homo sapiens
  misc_feature (61)..(62): /note="This region represents a CpG dinucleotide"
  misc_feature (61)..(61): /note="Nucleotide may be methylated to form 5-methylcytosine"
tacctaaaatgtccttcaactcccagcttgttgaggtgtatccagggaatgtttcacatgcgctcagtgagtcatgttcagttaccatgaagcagcctctgtttgtttcttgtcctgttgct

SEQ ID NO: 25606 - DNA, 122 bp, Homo sapiens
  misc_feature (61)..(62): /note="This region represents a CpG dinucleotide"
  misc_feature (61)..(61): /note="Nucleotide may be methylated to form 5-methylcytosine"
agatgtttctaaagtgacacccccgtcagcacagtttatattcaacctgatgattactagcgaagcaataaaaaaatatttaacaacctcataggcttgtggcaatgagccaatggtaactg

SEQ ID NO: 25607 - DNA, 122 bp, Homo sapiens
  misc_feature (61)..(62): /note="This region represents a CpG dinucleotide"
  misc_feature (61)..(61): /note="Nucleotide may be methylated to form 5-methylcytosine"
ggtgatccgcccgcctcggcctcccaaagtgctgggattacaggcataagccacagcgcccgaccatatttcaaggcctttttgctccacgtgctggttgccctaccagaactaaacggaca

SEQ ID NO: 25608 - DNA, 122 bp, Homo sapiens
  misc_feature (61)..(62): /note="This region represents a CpG dinucleotide"
  misc_feature (61)..(61): /note="Nucleotide may be methylated to form 5-methylcytosine"
cactcagatggaacttaatcctggttgtcacagtatccaaacttttgtcctgctaccttccgaactcctcagagactgctacctgatttgaacccagatggaccgacctcagctgttgtcca

SEQ ID NO: 25609 - DNA, 122 bp, Homo sapiens
  misc_feature (61)..(62): /note="This region represents a CpG dinucleotide"
  misc_feature (61)..(61): /note="Nucleotide may be methylated to form 5-methylcytosine"
ttgacagtgctctgggacaggtaccaaggcaggtgctgaagaaaaaggccaatcctgtgtcgtctcaggactttatggtatagaagggaagatgattacaagaccctgtggtgataaggcca

SEQ ID NO: 25610 - DNA, 122 bp, Homo sapiens
  misc_feature (61)..(62): /note="This region represents a CpG dinucleotide"
  misc_feature (61)..(61): /note="Nucleotide may be methylated to form 5-methylcytosine"
tgtgcatgactccagtggaatctgcatgcaatgctcagggcagggtttggcgctgcctcacgaagccattacatttctagacaaagaattaacagtttgtagtgagtgggttatctgttatt

SEQ ID NO: 25611 - DNA, 122 bp, Homo sapiens
  misc_feature (61)..(62): /note="This region represents a CpG dinucleotide"
  misc_feature (61)..(61): /note="Nucleotide may be methylated to form 5-methylcytosine"
cctagcaagctcacatggccgactccaagtgaggggacattggtgctctttgtataacaccgtctgtaaggcctctgcccaaaggaagtgctaaagtcaataaacatgggttccttgtccta

SEQ ID NO: 25612 - DNA, 122 bp, Homo sapiens
  misc_feature (61)..(62): /note="This region represents a CpG dinucleotide"
  misc_feature (61)..(61): /note="Nucleotide may be methylated to form 5-methylcytosine"
ttgggccaaataactttatgaagataaaaaagcttactgcttgtattggaacaatgcctacgcatttacaatcactaagaggagagagagaatgagattaaaaacagaagataaaaataaaa

SEQ ID NO: 25613 - DNA, 122 bp, Homo sapiens
  misc_feature (61)..(62): /note="This region represents a CpG dinucleotide"
  misc_feature (61)..(61): /note="Nucleotide may be methylated to form 5-methylcytosine"
ccagagaattaatttgctaatttacagtgattcagattcagctgccatttgttttgagcacgttacatgtcaaacactgagcttgaggctttctcaccaatgatctcatttaagcctctcag

SEQ ID NO: 25614 - DNA, 122 bp, Homo sapiens
  misc_feature (61)..(62): /note="This region represents a CpG dinucleotide"
  misc_feature (61)..(61): /note="Nucleotide may be methylated to form 5-methylcytosine"
agggtcgcggcacgctggaaagcagtttggtgatgtcacatcaagtcagcagatgtcttacgtcccagcgatcccacgcgcgacagtcatggaaacacaggtgcacagaaagagctgcacaa

SEQ ID NO: 25615 - DNA, 122 bp, Homo sapiens
  misc_feature (61)..(62): /note="This region represents a CpG dinucleotide"
  misc_feature (61)..(61): /note="Nucleotide may be methylated to form 5-methylcytosine"
aaggttaggggtgtaggaggcaattatgtctcttctctagcagctgccagagattactgccgtcagagtgattatcaccaaataattgttccctttcttccctgctgacagggcagaatggg

SEQ ID NO: 25616 - DNA, 122 bp, Homo sapiens
  misc_feature (61)..(62): /note="This region represents a CpG dinucleotide"
  misc_feature (61)..(61): /note="Nucleotide may be methylated to form 5-methylcytosine"
atattaagcagtgaccattgacataaaaatcttaaaaaacactgtaactaaaaacacttccgtgtgtgatggtcaactgaacctatgcatctggttttactccttccccaaaccccactaaa

SEQ ID NO: 25617 - DNA, 122 bp, Homo sapiens
  misc_feature (61)..(62): /note="This region represents a CpG dinucleotide"
  misc_feature (61)..(61): /note="Nucleotide may be methylated to form 5-methylcytosine"
agggaagaggaccatttgagtagaagaagcaacacgagtagagatttggcagtttaacagcgtatagttaagtcccaaggattgcaagtggtttggcagggttgggctgagaagaaggagtc

SEQ ID NO: 25618 - DNA, 122 bp, Homo sapiens
  misc_feature (61)..(62): /note="This region represents a CpG dinucleotide"
  misc_feature (61)..(61): /note="Nucleotide may be methylated to form 5-methylcytosine"
gccattcttacctgtttccacctgttgggtgcctgcttctgcctgttgggtgtctctcttcgtctgcctccacatatcaggcacctgtctttgtctgttgggtacctgtttgctattgggta

SEQ ID NO: 25619 - DNA, 122 bp, Homo sapiens
  misc_feature (61)..(62): /note="This region represents a CpG dinucleotide"
  misc_feature (61)..(61): /note="Nucleotide may be methylated to form 5-methylcytosine"
gcggagtataatacagtgaaccccatgtgtccatacccaccacaacaaactactgacgcacgcaacaaagtgaatggaagtaacaacctccgggaccgtgtctcccgccccaccccaatctc

SEQ ID NO: 25620 - DNA, 122 bp, Homo sapiens
  misc_feature (61)..(62): /note="This region represents a CpG dinucleotide"
  misc_feature (61)..(61): /note="Nucleotide may be methylated to form 5-methylcytosine"
atttactaaatgctactttgtgccagagttttacactttaaaatggtgaaatttaggttacgtatattttacaattaaaaaaatgaagaaggctggaaggctggatgtggtggctcacacct

SEQ ID NO: 25621 - DNA, 122 bp, Homo sapiens
  misc_feature (61)..(62): /note="This region represents a CpG dinucleotide"
  misc_feature (61)..(61): /note="Nucleotide may be methylated to form 5-methylcytosine"
agcaggttgtggtgagcatttagctgtctctgccacacatgcctcctgccaccgtttctgcgccaggcacctgggaagctctgctcataactgcttggtaaaggacatgacctgtttctttg

SEQ ID NO: 25622 - DNA, 122 bp, Homo sapiens
  misc_feature (61)..(62): /note="This region represents a CpG dinucleotide"
  misc_feature (61)..(61): /note="Nucleotide may be methylated to form 5-methylcytosine"
agctcattttcatgtgctcccagaggtctggccaaggtgccataggccttcatggaagggcgtgcaccatcatgctaggcttgaggattcctgaaaaagcatactgaagctctggaaggaac

SEQ ID NO: 25623 - DNA, 122 bp, Homo sapiens
  misc_feature (61)..(62): /note="This region represents a CpG dinucleotide"
  misc_feature (61)..(61): /note="Nucleotide may be methylated to form 5-methylcytosine"
catcatattactaccatttgcttctgacctctcactgaatcctgcttgtgatttggcttccgtttatattgtatttgttgatacaacagagacagtgtagggcttaggtgtgagattttact

SEQ ID NO: 25624 - DNA, 122 bp, Homo sapiens
  misc_feature (61)..(62): /note="This region represents a CpG dinucleotide"
  misc_feature (61)..(61): /note="Nucleotide may be methylated to form 5-methylcytosine"
gcccctcccgccacagaaccccagaaaaactgtcccacaacccccagtgaatgaccaaatcgaaaacccccaaacttgtatgccaaagccctcctaatcccgattctgctggcccctaggac

SEQ ID NO: 25625 - DNA, 122 bp, Homo sapiens
  misc_feature (61)..(62): /note="This region represents a CpG dinucleotide"
  misc_feature (61)..(61): /note="Nucleotide may be methylated to form 5-methylcytosine"
aaatgaggtgaggacgtaatgtcctatcacaggactgggcacatagtagcactcaacaaacgtcagctccattctggagaataaagaataatctcattagaactcctgggagaaaaacatga

SEQ ID NO: 25626 - DNA, 122 bp, Homo sapiens
  misc_feature (61)..(62): /note="This region represents a CpG dinucleotide"
  misc_feature (61)..(61): /note="Nucleotide may be methylated to form 5-methylcytosine"
ggcataagtctttctaatctgttcataaccaaatatagcacacaggaaatcactgcaaagcgctgatataatcttttctgttttactccatctgaagatggttcctgcctgaaccatgcaca

SEQ ID NO: 25627 - DNA, 122 bp, Homo sapiens
  misc_feature (61)..(62): /note="This region represents a CpG dinucleotide"
  misc_feature (61)..(61): /note="Nucleotide may be methylated to form 5-methylcytosine"
agttagatcattggcagagtagagttggaatttgctcattctctgtggttaaccactctacgatcttttgcttcttggctcttatcagggatgaccttatatttaactttttgatgtatatt

SEQ ID NO: 25628 - DNA, 122 bp, Homo sapiens
  misc_feature (61)..(62): /note="This region represents a CpG dinucleotide"
  misc_feature (61)..(61): /note="Nucleotide may be methylated to form 5-methylcytosine"
ccgctgttccgtgggacgtgcaggagagcagcaaaaggcaggagtggccagtggcacccgcgcccccgccccttccccaggccggacactcgcggggacgcagagccgccggagcccaggat

SEQ ID NO: 25629 - DNA, 122 bp, Homo sapiens
  misc_feature (61)..(62): /note="This region represents a CpG dinucleotide"
  misc_feature (61)..(61): /note="Nucleotide may be methylated to form 5-methylcytosine"
taggttcttacacaacctattactcattcatctaacaaatattttttgtgctaagcaatacgccaagggcttagatacaatggtgatcaacataactatggtctgtgttcctccagacagcc

SEQ ID NO: 25630 - DNA, 122 bp, Homo sapiens
  misc_feature (61)..(62): /note="This region represents a CpG dinucleotide"
  misc_feature (61)..(61): /note="Nucleotide may be methylated to form 5-methylcytosine"
aaagtacagtccaaaaatcagttagggtgactcattttaaactctaatctgttacatacacgacaacagttgctatctcttgagatctttaaatgtcttggtgtgttgtgacctctctcttc

SEQ ID NO: 25631 - DNA, 122 bp, Homo sapiens
  misc_feature (61)..(62): /note="This region represents a CpG dinucleotide"
  misc_feature (61)..(61): /note="Nucleotide may be methylated to form 5-methylcytosine"
cccccgaatataacagacactcgctccatacaccaaacttcccagttcctgaggttgctacgctaaatttatcctgaatgtcgcacagaaaccagggtcaataggacgatcagcacggatgg

SEQ ID NO: 25632 - DNA, 122 bp, Homo sapiens
  misc_feature (61)..(62): /note="This region represents a CpG dinucleotide"
  misc_feature (61)..(61): /note="Nucleotide may be methylated to form 5-methylcytosine"
ccctgtcacatggctagcaagcaggccaggcaggatgagagctcaggccttgtgacttcccgttcagtgctctccactgttcctctcagttgataagtggtcctgagaccacctgtgctcct

SEQ ID NO: 25633 - DNA, 122 bp, Homo sapiens
  misc_feature (61)..(62): /note="This region represents a CpG dinucleotide"
  misc_feature (61)..(61): /note="Nucleotide may be methylated to form 5-methylcytosine"
gccagaaatgctggttggtaggtggcactcagcaagacactcattccaaagcaacacacacgtaatgaatgcaaggattcagtcacgctcaggagaacacaacaacactggctcccttgacc

SEQ ID NO: 25634 - DNA, 122 bp, Homo sapiens
  misc_feature (61)..(62): /note="This region represents a CpG dinucleotide"
  misc_feature (61)..(61): /note="Nucleotide may be methylated to form 5-methylcytosine"
acatccagtcctgctgtgatctttgcacaggaccacaagttcaactgcagatgcgtccttcgtagcttacatatagttatctacgggccgattcccttgctaagaaactctggtttctaagt

SEQ ID NO: 25635 - DNA, 122 bp, Homo sapiens
  misc_feature (61)..(62): /note="This region represents a CpG dinucleotide"
  misc_feature (61)..(61): /note="Nucleotide may be methylated to form 5-methylcytosine"
caggaaaggttaaagattactgctctacctttgtactttgaaggttttttattaatcaagcggtcaggataccgggtgagtctatagatgataatgttaaacctaagacttctgttttaatt

SEQ ID NO: 25636 - DNA, 122 bp, Homo sapiens
  misc_feature (61)..(62): /note="This region represents a CpG dinucleotide"
  misc_feature (61)..(61): /note="Nucleotide may be methylated to form 5-methylcytosine"
atttgaaatcagttggggaaatccagtgtgaatttcctacttattttgatgtaaccgtcacgaggtgcacggcaaaagatcagaaatagaacggcagactttttatgattggctggggtgag

SEQ ID NO: 25637 - DNA, 122 bp, Homo sapiens
  misc_feature (61)..(62): /note="This region represents a CpG dinucleotide"
  misc_feature (61)..(61): /note="Nucleotide may be methylated to form 5-methylcytosine"
tttaccttcgacatgttaataaataactttgcagataatagtaaatgtctgtacagtattcgtctgctaaggctgtcgtaacaccataccacagactgagtggctgcaacaacagaaatgta

SEQ ID NO: 25638 - DNA, 122 bp, Homo sapiens
  misc_feature (61)..(62): /note="This region represents a CpG dinucleotide"
  misc_feature (61)..(61): /note="Nucleotide may be methylated to form 5-methylcytosine"
acaaagtaatgagcctattgctgtggtttaggacctctcagcctgctagatggagccacacggaacagtaaatgacactgaaacagggaccacaaaggccatggtctgttgtccttcaggat

SEQ ID NO: 25639 - DNA, 122 bp, Homo sapiens
  misc_feature (61)..(62): /note="This region represents a CpG dinucleotide"
  misc_feature (61)..(61): /note="Nucleotide may be methylated to form 5-methylcytosine"
tcagaagtcagattttctgggttcaaagaccagctccatctcttactagcaaggtaaggacgggagtcaagatgatcaaggctctgtgccttagttcccttacctacgaaattacaattaaa

SEQ ID NO: 25640 - DNA, 122 bp, Homo sapiens
  misc_feature (61)..(62): /note="This region represents a CpG dinucleotide"
  misc_feature (61)..(61): /note="Nucleotide may be methylated to form 5-methylcytosine"
ttcttggttcagggaaccacccactgagggggctggctgggagatgcctctcgacactgacgctgtcaaccctgtgtggaattgagaattccactggcttttgttcctggttcctgggaggt

SEQ ID NO: 25641 - DNA, 122 bp, Homo sapiens
  misc_feature (61)..(62): /note="This region represents a CpG dinucleotide"
  misc_feature (61)..(61): /note="Nucleotide may be methylated to form 5-methylcytosine"
aaaagccacatactgaaatcaccagagtcagcaaatccatacagacagagagcacattagcggttgacaagcgctcgggagggaggaccagggagtgactgcttaatgcttatgacatttcc

SEQ ID NO: 25642 - DNA, 122 bp, Homo sapiens
  misc_feature (61)..(62): /note="This region represents a CpG dinucleotide"
  misc_feature (61)..(61): /note="Nucleotide may be methylated to form 5-methylcytosine"
ttacagtgccattctattattttcatcctacttttcatttttgtcttcagcagcaaataccggcatttaagacatggcattaaagagtttaagaacagttggtgttattcacaattctccta

SEQ ID NO: 25643 - DNA, 122 bp, Homo sapiens
  misc_feature (61)..(62): /note="This region represents a CpG dinucleotide"
  misc_feature (61)..(61): /note="Nucleotide may be methylated to form 5-methylcytosine"
catgatcttcctgccttagccttctgagtagctgagtcagactacaggtgtgcaccattgcgcccagcctaaaatggtttttaaaatttaattaaggcttaggctgttgctgctatagtatt

SEQ ID NO: 25644 - DNA, 122 bp, Homo sapiens
  misc_feature (61)..(62): /note="This region represents a CpG dinucleotide"
  misc_feature (61)..(61): /note="Nucleotide may be methylated to form 5-methylcytosine"
ggggtgagttttaccttgagctctccgtctataccctgtgagctctccaaattccagctgcggcttgatctatgtctctgattagtggatgtcatggtttatgatctgctgagccacatcta

SEQ ID NO: 25645 - DNA, 122 bp, Homo sapiens
  misc_feature (61)..(62): /note="This region represents a CpG dinucleotide"
  misc_feature (61)..(61): /note="Nucleotide may be methylated to form 5-methylcytosine"
gaggtgtagacacttcataccttacttcactccccactgtaaggaagatttaacttgaagcggagataatgatttgaatttacggcttttataatgtcataaatgggcgtcattttaataac

SEQ ID NO: 25646 - DNA, 122 bp, Homo sapiens
  misc_feature (61)..(62): /note="This region represents a CpG dinucleotide"
  misc_feature (61)..(61): /note="Nucleotide may be methylated to form 5-methylcytosine"
tgattggaagataaaaggagataatgggcaagaaagcaaattacataataatgacattcacgtctatacactttactgacacaatcatggggatgggtgaccaccttctcctcctctcgctg

SEQ ID NO: 25647 - DNA, 122 bp, Homo sapiens
  misc_feature (61)..(62): /note="This region represents a CpG dinucleotide"
  misc_feature (61)..(61): /note="Nucleotide may be methylated to form 5-methylcytosine"
tgttagttccttcattgtgtgatcagctgaggactcaatggtaccagccataaggctattcgtcatgggcccttctcactgggctgggcaccaaatgccaagcctgagtgcacagtgatggc

SEQ ID NO: 25648 - DNA, 122 bp, Homo sapiens
  misc_feature (61)..(62): /note="This region represents a CpG dinucleotide"
  misc_feature (61)..(61): /note="Nucleotide may be methylated to form 5-methylcytosine"
tgcctctgacccattacagggcagattaatgggcaccagaaacatatgtcaaatagcaatcgctgctaatggacaggaaatccccacattgtcagggcagttgaatttagcaaccactcagt

SEQ ID NO: 25649 - DNA, 122 bp, Homo sapiens
  misc_feature (61)..(62): /note="This region represents a CpG dinucleotide"
  misc_feature (61)..(61): /note="Nucleotide may be methylated to form 5-methylcytosine"
aaaaatacaacataagcaagaatgatgtcaactcctcatccaatctgataaaaatatcctcgtcaggcagaagggcacttttatttatttaaccctgccatgtgacagataacacgccagat

SEQ ID NO: 25650 - DNA, 122 bp, Homo sapiens
  misc_feature (61)..(62): /note="This region represents a CpG dinucleotide"
  misc_feature (61)..(61): /note="Nucleotide may be methylated to form 5-methylcytosine"
acctcgtgatctgcctgcctctgcctccgaaagtgctgggattataggcatgagccaccacgcctgggctggatttcttaaatatggtgattcagtgacattttgctgtgtaattattggca

SEQ ID NO: 25651 - DNA, 122 bp, Homo sapiens
  misc_feature (61)..(62): /note="This region represents a CpG dinucleotide"
  misc_feature (61)..(61): /note="Nucleotide may be methylated to form 5-methylcytosine"
ttcttacgacctgtttttcagctttgacctcctttttgcattccatatttgtctggcaaccgcttagtcacactctctacttcagtgtcaaattgacattttgaatttaaaatgttaaaagc

SEQ ID NO: 25652 - DNA, 122 bp, Homo sapiens
  misc_feature (61)..(62): /note="This region represents a CpG dinucleotide"
  misc_feature (61)..(61): /note="Nucleotide may be methylated to form 5-methylcytosine"
ttaggaaggggaattaggacacagacaggtacgcagggcccacgatgtgaggaagcaccccggagaggcctcgggagaagcagccttgagcctccagcctccagagctggaagaaagtagat

SEQ ID NO: 25653 - DNA, 122 bp, Homo sapiens
  misc_feature (61)..(62): /note="This region represents a CpG dinucleotide"
  misc_feature (61)..(61): /note="Nucleotide may be methylated to form 5-methylcytosine"
ctctcaaagtggtaggattacagccatgagctaccatgcccggcctgtcatactttttttcggaaacaaaagattagttctgtatttcaacattaacaatgaccacactctgactcaatatt

SEQ ID NO: 25654 - DNA, 122 bp, Homo sapiens
  misc_feature (61)..(62): /note="This region represents a CpG dinucleotide"
  misc_feature (61)..(61): /note="Nucleotide may be methylated to form 5-methylcytosine"
gtgatttcttactcaggctaaaggtatccagggatgaagccaatccctatgagtgactcacggctggtaaccaacggcccacgaggtaggctcatgtaaccaaacatcacctcctcagtcag

SEQ ID NO: 25655 - DNA, 122 bp, Homo sapiens
  misc_feature (61)..(62): /note="This region represents a CpG dinucleotide"
  misc_feature (61)..(61): /note="Nucleotide may be methylated to form 5-methylcytosine"
cacccttctctctccctgcttggtgtgacttggccaaataacatgaccccactgtcactacggccaccttcttcatactccaccctaaaatccagcctcagagatgctgctgtcagttgcgc

SEQ ID NO: 25656 - DNA, 122 bp, Homo sapiens
  misc_feature (61)..(62): /note="This region represents a CpG dinucleotide"
  misc_feature (61)..(61): /note="Nucleotide may be methylated to form 5-methylcytosine"
atttaaatttgcaggctgctactctgagtgactgaacaggaagctagctggtccctttagcgctaacaaagcttgatttaggctgaaagattagaaagcacatcttattctataaacgcttc

SEQ ID NO: 25657 - DNA, 122 bp, Homo sapiens
  misc_feature (61)..(62): /note="This region represents a CpG dinucleotide"
  misc_feature (61)..(61): /note="Nucleotide may be methylated to form 5-methylcytosine"
cagccagtcctcctcaaggttcaggaaagctgcctggagcagaaggagtctcaaaattcacgggcaccacttgcactgcagctgaggatccccagacagcagcatccccacccccaggtggt

SEQ ID NO: 25658 - DNA, 122 bp, Homo sapiens
  misc_feature (61)..(62): /note="This region represents a CpG dinucleotide"
  misc_feature (61)..(61): /note="Nucleotide may be methylated to form 5-methylcytosine"
tctctttccctctctatgctgttatttttggatttcaaataactcggttgttgaaacctccgatatccctaggggtgaactgaatgaagtgttgcacggcattaaatgtcattgaatgggat

SEQ ID NO: 25659 - DNA, 122 bp, Homo sapiens
  misc_feature (61)..(62): /note="This region represents a CpG dinucleotide"
  misc_feature (61)..(61): /note="Nucleotide may be methylated to form 5-methylcytosine"
aacaaactcacaaactgcagggttcatgttcagtccaaagctggagtcccaggaggtgagcgtgtgggccaaggatgtggggatctgagcaaagaatcctttcccttcccctcctcccctgg

SEQ ID NO: 25660 - DNA, 122 bp, Homo sapiens
  misc_feature (61)..(62): /note="This region represents a CpG dinucleotide"
  misc_feature (61)..(61): /note="Nucleotide may be methylated to form 5-methylcytosine"
aaagttaaggggtggaaacaagagtaggtggcgcagccaatcccaagtcggtaactaaatcggaacagctggagctctgcctggaatgtgaggattccggaccccaggagtagtccaggcaa

SEQ ID NO: 25661 - DNA, 122 bp, Homo sapiens
  misc_feature (61)..(62): /note="This region represents a CpG dinucleotide"
  misc_feature (61)..(61): /note="Nucleotide may be methylated to form 5-methylcytosine"
ttgtaatcaagaaagggcagcagaaccagctggagaaggtgccccatgaacatactcaggcgccacctctggacagtctcatgttgactcagcagaacctggacgtgtgtgttttgaaagca

SEQ ID NO: 25662 - DNA, 122 bp, Homo sapiens
  misc_feature (61)..(62): /note="This region represents a CpG dinucleotide"
  misc_feature (61)..(61): /note="Nucleotide may be methylated to form 5-methylcytosine"
gagaaacaaaccactctgccaagagatgggcaaggggcctcttgtggccctcccggtggacggctgcatctacagtcctttgcctaaaaccaacaatcctgcctgaccccagtccctgtgag

SEQ ID NO: 25663 - DNA, 122 bp, Homo sapiens
  misc_feature (61)..(62): /note="This region represents a CpG dinucleotide"
  misc_feature (61)..(61): /note="Nucleotide may be methylated to form 5-methylcytosine"
tttctatttatttatctgatcccgaataacaagccgggaagttctgcttcatgggggtgacgtaagtgatggatgtgagtaccgcgtttcctaagccacatgcccggcctcacggtctgaca

SEQ ID NO: 25664 - DNA, 122 bp, Homo sapiens
  misc_feature (61)..(62): /note="This region represents a CpG dinucleotide"
  misc_feature (61)..(61): /note="Nucleotide may be methylated to form 5-methylcytosine"
cctcaacagttaatctgagaaccaagccaactactaagtaactaacggggcaggttgcatcgacagtttagagacactggacaaagggatgattcacatcatagatgggatggagcaggatg

SEQ ID NO: 25665 - DNA, 122 bp, Homo sapiens
  misc_feature (61)..(62): /note="This region represents a CpG dinucleotide"
  misc_feature (61)..(61): /note="Nucleotide may be methylated to form 5-methylcytosine"
cactgttttctgattaataaggtgggtggaccttatgaaatgttatctgaagatcacgcacgtaatctttgatggctgttattgcgttatattgacttgtgattcctgtgtgttcaacttct

SEQ ID NO: 25666 - DNA, 122 bp, Homo sapiens
  misc_feature (61)..(62): /note="This region represents a CpG dinucleotide"
  misc_feature (61)..(61): /note="Nucleotide may be methylated to form 5-methylcytosine"
tgcactttaaccttgttctttacctgctctgaagcctttcttgcattttaatgacaagaacggtgtattttgcctttcagtgagtttgttaattatggagatcaaactctgcctttcattac

SEQ ID NO: 25667 - DNA, 122 bp, Homo sapiens
  misc_feature (61)..(62): /note="This region represents a CpG dinucleotide"
  misc_feature (61)..(61): /note="Nucleotide may be methylated to form 5-methylcytosine"
cactttggagaaaatgggctcgtttgacaggatggcctggtgagggaacacaggtactaacggtaacaggccgatgaacactcaccactggcatcagggtggagctcagctgactggacact

SEQ ID NO: 25668 - DNA, 122 bp, Homo sapiens
  misc_feature (61)..(62): /note="This region represents a CpG dinucleotide"
  misc_feature (61)..(61): /note="Nucleotide may be methylated to form 5-methylcytosine"
gcagtaaattgtatttgtcccctagattcgtgcctgcatttgcaatcctttttgctaatacgcataaattttatagcctgtctttgcgtgaaaaggcttcacaagttaaggattattagatg

SEQ ID NO: 25669 - DNA, 122 bp, Homo sapiens
  misc_feature (61)..(62): /note="This region represents a CpG dinucleotide"
  misc_feature (61)..(61): /note="Nucleotide may be methylated to form 5-methylcytosine"
tgatcagatatcaccatcttctcattaatgtttgtgattaacattaagaagacatggttacgtgagaagtgatgcaaatgctgtatcttttaaaactttatttgaatcactcatttctggcc

SEQ ID NO: 25670 - DNA, 122 bp, Homo sapiens
  misc_feature (61)..(62): /note="This region represents a CpG dinucleotide"
  misc_feature (61)..(61): /note="Nucleotide may be methylated to form 5-methylcytosine"
acacagagtgatccgccctcttttccctggtgaatcacgcagcctaactcaccatgttcccggccacgccacagtgaatcacgcagcctaactcaccaggttactggcctaactcaccatgt

SEQ ID NO: 25671 - DNA, 122 bp, Homo sapiens
  misc_feature (61)..(62): /note="This region represents a CpG dinucleotide"
  misc_feature (61)..(61): /note="Nucleotide may be methylated to form 5-methylcytosine"
catctgtcttcaggtgcctggctttctggcctgaggtggaagcagaggccagcctctctccgtcatccctatctcccctgggcttacatcatggcggggctttgaaaatctccctctgtggc

SEQ ID NO: 25672 - DNA, 122 bp, Homo sapiens
  misc_feature (61)..(62): /note="This region represents a CpG dinucleotide"
  misc_feature (61)..(61): /note="Nucleotide may be methylated to form 5-methylcytosine"
tgcccggtttgccttcttcctccagagccgagacatggcctcaagtcgacttgtctttcccgctaaccaaccccagggcattcatcgcgtgtccatgggccgtgggactcaaatctgaatct

SEQ ID NO: 25673 - DNA, 122 bp, Homo sapiens
  misc_feature (61)..(62): /note="This region represents a CpG dinucleotide"
  misc_feature (61)..(61): /note="Nucleotide may be methylated to form 5-methylcytosine"
ccccttccaaaagagaattatcaggtccaaactgtcaatagtgctgaggttgagaaatcacgatctagaagtacaggctttgcttgtagcccttgatctgcaagaatcctactttacagtaa

SEQ ID NO: 25674 - DNA, 122 bp, Homo sapiens
  misc_feature (61)..(62): /note="This region represents a CpG dinucleotide"
  misc_feature (61)..(61): /note="Nucleotide may be methylated to form 5-methylcytosine"
ttgaatataatttaagataatgtcacttaaactgctttgtgttgacagtaaacaataaagcgtaaataaatttccctaaagtattttctcatagccagtctgatctttactttctcaacatg

SEQ ID NO: 25675 - DNA, 122 bp, Homo sapiens
  misc_feature (61)..(62): /note="This region represents a CpG dinucleotide"
  misc_feature (61)..(61): /note="Nucleotide may be methylated to form 5-methylcytosine"
ctaatcaacctgtgtccgtcaaacacacatggctgtgctatgcatggcacaggggaatgacgtgatcagtagtaagaggaagaagacagactggaaaaacccaaaatgtgtgatatcttaat

SEQ ID NO: 25676 - DNA, 122 bp, Homo sapiens
  misc_feature (61)..(62): /note="This region represents a CpG dinucleotide"
  misc_feature (61)..(61): /note="Nucleotide may be methylated to form 5-methylcytosine"
tattatttatgtgctacataaatttgtaggccaagaatttttctcccgttttagaagcctcgccaaagttttctggccaactgcaatgcctgaggtcatttcctcattcctttagagttgag

SEQ ID NO: 25677 - DNA, 122 bp, Homo sapiens
  misc_feature (61)..(62): /note="This region represents a CpG dinucleotide"
  misc_feature (61)..(61): /note="Nucleotide may be methylated to form 5-methylcytosine"
gcagtgcatagagcacttctccagctctgtttaaatacaccattgacttgttgcctatgacgccatcaagagtgttcctacagacacagccagacagctaagtcaggcagagcccaaaatag

SEQ ID NO: 25678 - DNA, 122 bp, Homo sapiens
  misc_feature (61)..(62): /note="This region represents a CpG dinucleotide"
  misc_feature (61)..(61): /note="Nucleotide may be methylated to form 5-methylcytosine"
tgtctgcctgtggatctcagccaggcctgtctgtacatatgctctgtaggaacaagctttcgtagtcattttttgtttttttgttttttgttttcccaagatggagtctcgccctgtcaccc

SEQ ID NO: 25679 - DNA, 122 bp, Homo sapiens
  misc_feature (61)..(62): /note="This region represents a CpG dinucleotide"
  misc_feature (61)..(61): /note="Nucleotide may be methylated to form 5-methylcytosine"
aagacttgtgcagatgattcgatggagagcagactggagtgacgggcgaatcagctgggacgctgccgagaacccctgtgccttttccggtgcaggaagaaatggaggggaagcttgtacgt

SEQ ID NO: 25680 - DNA, 122 bp, Homo sapiens
  misc_feature (61)..(62): /note="This region represents a CpG dinucleotide"
  misc_feature (61)..(61): /note="Nucleotide may be methylated to form 5-methylcytosine"
ccatgagctctcacccatgtatcagctgccttgctagatcctgtttctcagcaccagcagcggggagggccatcttcatgagaaagttcacagtcatcattggtcagcagagataggaagga

SEQ ID NO: 25681 - DNA, 122 bp, Homo sapiens
  misc_feature (61)..(62): /note="This region represents a CpG dinucleotide"
  misc_feature (61)..(61): /note="Nucleotide may be methylated to form 5-methylcytosine"
agattcatcacttctcccttctgcccctctggactgcaccgtgtttattcatgtgtctgacgcctgagcaaagtggagttccttaaagtcccggagctgtgacactcatctccatagcagca

SEQ ID NO: 25682 - DNA, 122 bp, Homo sapiens
  misc_feature (61)..(62): /note="This region represents a CpG dinucleotide"
  misc_feature (61)..(61): /note="Nucleotide may be methylated to form 5-methylcytosine"
tttaatatatttccattttaaaaaataggctgcatgtgcctcaggtgacatactgcactacgcaggaaacaggaaacccaacctaccgagagttgtcaatgagataaagaagatcccagtgt

SEQ ID NO: 25683 - DNA, 122 bp, Homo sapiens
  misc_feature (61)..(62): /note="This region represents a CpG dinucleotide"
  misc_feature (61)..(61): /note="Nucleotide may be methylated to form 5-methylcytosine"
atcttattaagtacacattgaatgtccttccttagcaagtaggttgttcctgccaggtctcgtatccctcagtcttgaagaacatacactgacacagatgagtgggatgcacaaaatcatag

SEQ ID NO: 25684 - DNA, 122 bp, Homo sapiens
  misc_feature (61)..(62): /note="This region represents a CpG dinucleotide"
  misc_feature (61)..(61): /note="Nucleotide may be methylated to form 5-methylcytosine"
cacagtactcattgcagaagtgccaggcttctcaatcacgctgtgggggatggtggccttcgccactgaaaggctgcccaggaacagaggtgaccctcccctccaggagtcaatgtcagact

SEQ ID NO: 25685 - DNA, 122 bp, Homo sapiens
  misc_feature (61)..(62): /note="This region represents a CpG dinucleotide"
  misc_feature (61)..(61): /note="Nucleotide may be methylated to form 5-methylcytosine"
attaccctcattgtgcttccccattctcagagagtaaaaccacagggcagttctggctgacgggtttgcacctatctggtgtctgctccactgtttctgtcatgttgagtcacagggcattc

SEQ ID NO: 25686 - DNA, 122 bp, Homo sapiens
  misc_feature (61)..(62): /note="This region represents a CpG dinucleotide"
  misc_feature (61)..(61): /note="Nucleotide may be methylated to form 5-methylcytosine"
aagaatcactgtttcataacccaaaacaaagactgtatgtaggaccaataagccatttcacgtagcctttaccactaaagattgtgaaatacatgttttgtaactataattagtattattat

SEQ ID NO: 25687 - DNA, 122 bp, Homo sapiens
  misc_feature (61)..(62): /note="This region represents a CpG dinucleotide"
  misc_feature (61)..(61): /note="Nucleotide may be methylated to form 5-methylcytosine"
cagtaaacacgtgttgattgaattgagcaagtgaatgagtgaacggctgcagcggacccccgaactcccccaactcgaaccaccgccgcaggtaattccacctggcccaggttccaccccag

SEQ ID NO: 25688 - DNA, 122 bp, Homo sapiens
  misc_feature (61)..(62): /note="This region represents a CpG dinucleotide"
  misc_feature (61)..(61): /note="Nucleotide may be methylated to form 5-methylcytosine"
ttcaggctggatactttccaggataagtcctacttgggatctgctttcattaatcctttgcgttaagtaatcatatttttgcaagcgtcttgtggtagctctaccaaatgctcctccaaacc

SEQ ID NO: 25689 - DNA, 122 bp, Homo sapiens
  misc_feature (61)..(62): /note="This region represents a CpG dinucleotide"
  misc_feature (61)..(61): /note="Nucleotide may be methylated to form 5-methylcytosine"
atatctgctttggaagcaaatgatggaaagttttgtccaggttgccttccctcacttttgcgcgtgggtgtgagtttgtgtacccgattctactgtgaggagttcaggttgctttacctgct

SEQ ID NO: 25690 - DNA, 122 bp, Homo sapiens
  misc_feature (61)..(62): /note="This region represents a CpG dinucleotide"
  misc_feature (61)..(61): /note="Nucleotide may be methylated to form 5-methylcytosine"
caggaagaggctgctttagtgatgagtgtggcagaggaggagctgtctcatactagcctgcggatttcctttatggagtaaatcctttaagattcttctcaagagctgggcgcagtgtctta

SEQ ID NO: 25691 - DNA, 122 bp, Homo sapiens
  misc_feature (61)..(62): /note="This region represents a CpG dinucleotide"
  misc_feature (61)..(61): /note="Nucleotide may be methylated to form 5-methylcytosine"
caggcctgtctattccaggacatacggcagggagctgcatggggtgctcatggccggccacgtggggaggggtgtgcccattctgcaggatttctgaggcacagtagtatcatggaaactgg

SEQ ID NO: 25692 - DNA, 122 bp, Homo sapiens
  misc_feature (61)..(62): /note="This region represents a CpG dinucleotide"
  misc_feature (61)..(61): /note="Nucleotide may be methylated to form 5-methylcytosine"
tagatgacataatcacatgggctgactttttgaccctctttttgactacctcttttaaatcgctttttgcacaaatcacagcctaagtgacagcagataacattttcttcccctctagcacc

SEQ ID NO: 25693 - DNA, 122 bp, Homo sapiens
  misc_feature (61)..(62): /note="This region represents a CpG dinucleotide"
  misc_feature (61)..(61): /note="Nucleotide may be methylated to form 5-methylcytosine"
catatttagtgccctgcttcctgtgtttactctattttcataacctaggcagctatggtccgatgaatgatttaactgctttagctagttgcactattgcatgattttagcctgatttcatg

SEQ ID NO: 25694 - DNA, 122 bp, Homo sapiens
  misc_feature (61)..(62): /note="This region represents a CpG dinucleotide"
  misc_feature (61)..(61): /note="Nucleotide may be methylated to form 5-methylcytosine"
gagaagcctcctgacagccaaggagaccagcagccagtagagcaggtgttgtaacaaggccgaggaccctcagacaccaattttgctggtaagaccgctgcccaggatgcaccgtacaagag

SEQ ID NO: 25695 - DNA, 122 bp, Homo sapiens
  misc_feature (61)..(62): /note="This region represents a CpG dinucleotide"
  misc_feature (61)..(61): /note="Nucleotide may be methylated to form 5-methylcytosine"
aaaaaaatagacatccaataaaatgcaaatttgtggtaagcagtaggagaaaacaagaagcggaaagaggaaggttgcctaacctcgatggcaatattctctaggtcatccgtgagctttga

SEQ ID NO: 25696 - DNA, 122 bp, Homo sapiens
  misc_feature (61)..(62): /note="This region represents a CpG dinucleotide"
  misc_feature (61)..(61): /note="Nucleotide may be methylated to form 5-methylcytosine"
agcagcagccatcttgcaaccataagactaacaagttcaagaccaaaggccaacacattacgaatgaagtggggaaagatatggcaagcctagatccctgacaactcttctgggctggtgaa

SEQ ID NO: 25697 - DNA, 122 bp, Homo sapiens
  misc_feature (61)..(62): /note="This region represents a CpG dinucleotide"
  misc_feature (61)..(61): /note="Nucleotide may be methylated to form 5-methylcytosine"
ttggtaacaatgctgaggtaatgaaaatgaactcagctgccactgttggcacagacacagcggaaggaagaagtattatttgattcaaagcattctcatttaggggagaaaaaattataatg

SEQ ID NO: 25698 - DNA, 122 bp, Homo sapiens
  misc_feature (61)..(62): /note="This region represents a CpG dinucleotide"
  misc_feature (61)..(61): /note="Nucleotide may be methylated to form 5-methylcytosine"
ctggtaggtgtctgcgtttcagcggctccgcaggagggtgggcccagtgactcaccatagcgatccttttacttttactagtgaccaatctgagttttttcattacacggcaatgattcacc

SEQ ID NO: 25699 - DNA, 122 bp, Homo sapiens
  misc_feature (61)..(62): /note="This region represents a CpG dinucleotide"
  misc_feature (61)..(61): /note="Nucleotide may be methylated to form 5-methylcytosine"
tccttccaccctgaggcctggctttgtcctttgtctgcaacttgtcagggtttttccctacgcctgggctccagatggctcttggctcacccagggccttttgctattgtgtgactcacaga

SEQ ID NO: 25700 - DNA, 122 bp, Homo sapiens
  misc_feature (61)..(62): /note="This region represents a CpG dinucleotide"
  misc_feature (61)..(61): /note="Nucleotide may be methylated to form 5-methylcytosine"
gagggtgaggaaggcagaccacctaatgacctggccccgtggaatttggcctccctgcttcgtggcacttattcagcagtgctccactgtggaagcagggtgtggctgggtctggcattaag

SEQ ID NO: 25701 - DNA, 122 bp, Homo sapiens
  misc_feature (61)..(62): /note="This region represents a CpG dinucleotide"
  misc_feature (61)..(61): /note="Nucleotide may be methylated to form 5-methylcytosine"
ctcagggacagacatcagccagatcccatctgcaaacacaccaaagctttattcaacaggcgtggcttcctgaagcgtaaagccacttcacagacggtggccacagcggcacctcggccaga

SEQ ID NO: 25702 - DNA, 122 bp, Homo sapiens
  misc_feature (61)..(62): /note="This region represents a CpG dinucleotide"
  misc_feature (61)..(61): /note="Nucleotide may be methylated to form 5-methylcytosine"
gcccatgtggtgagctgctgaggcctcctgctgacaccatgtgtgtgagtcagtttggcacgctcctccagccctggtcaggccttcgaattatgcagccagggccgaggtccttactgtac

SEQ ID NO: 25703 - DNA, 122 bp, Homo sapiens
  misc_feature (61)..(62): /note="This region represents a CpG dinucleotide"
  misc_feature (61)..(61): /note="Nucleotide may be methylated to form 5-methylcytosine"
cccgatgctggttctgcggccggagggagctggggctggggctggtgctggtgcggtgcccggcggtattgctcagaggaagatgctacagtctagacgctgggcgggttccggctgcaccc

SEQ ID NO: 25704 - DNA, 122 bp, Homo sapiens
  misc_feature (61)..(62): /note="This region represents a CpG dinucleotide"
  misc_feature (61)..(61): /note="Nucleotide may be methylated to form 5-methylcytosine"
tgggtgtgcactccattggttgctggccagcagtcttcaaggtggttgagttcttcctgccgcacaggctggacagtcaagtgctcctcttgcgtggcttgtgagtaaaggtaaatgcatta

SEQ ID NO: 25705 - DNA, 122 bp, Homo sapiens
  misc_feature (61)..(62): /note="This region represents a CpG dinucleotide"
  misc_feature (61)..(61): /note="Nucleotide may be methylated to form 5-methylcytosine"
attggctgtggaatatgctaagtaaataggaagagaaagcactgaagtcagttggtcaaccgcaaacagggttcaataccaattcaaagaattaccagtttatcagtaagatctggttacgt

SEQ ID NO: 25706 - DNA, 122 bp, Homo sapiens
  misc_feature (61)..(62): /note="This region represents a CpG dinucleotide"
  misc_feature (61)..(61): /note="Nucleotide may be methylated to form 5-methylcytosine"
agctatcataaggctctccggaaaggtagtacagacttccccttttcttggctcatatagcgcctcttccccacagttctagaataatgggttccagatttaatgtgggagagaatttaggt

SEQ ID NO: 25707 - DNA, 122 bp, Homo sapiens
  misc_feature (61)..(62): /note="This region represents a CpG dinucleotide"
  misc_feature (61)..(61): /note="Nucleotide may be methylated to form 5-methylcytosine"
ctgtttggatctcgttaatctctgcaaaatccctgtgcccacaagctggcgtccaaaactcgcttctactggattgaagaatggcctacttcagttcaccaggggctcctaagggagacttt

SEQ ID NO: 25708 - DNA, 122 bp, Homo sapiens
  misc_feature (61)..(62): /note="This region represents a CpG dinucleotide"
  misc_feature (61)..(61): /note="Nucleotide may be methylated to form 5-methylcytosine"
cggctgttgcagcctctgaaattgctctcacgatcccttccccgctttcaaggtgagagccgccttcaagcacaaaaccaaggtctggtcgctcacgagcagctctgcccgcacctccaacg

SEQ ID NO: 25709 - DNA, 122 bp, Homo sapiens
  misc_feature (61)..(62): /note="This region represents a CpG dinucleotide"
  misc_feature (61)..(61): /note="Nucleotide may be methylated to form 5-methylcytosine"
aagtagtcaaaatcatagaaacagaaaggaaaatagtgattctcagggattgagagtagacggaattggggagttattgtgtaatgggtatagagttgcaatttggcaagatgaaaaagttc

SEQ ID NO: 25710 - DNA, 122 bp, Homo sapiens
  misc_feature (61)..(62): /note="This region represents a CpG dinucleotide"
  misc_feature (61)..(61): /note="Nucleotide may be methylated to form 5-methylcytosine"
taaacctttcaaccatggttaattaacgactttccttactgttcatataggtcataccaccgtctgtcctttcctgtttttaatgttaaaaacaggaagccacttccttgctgtttctatgc

SEQ ID NO: 25711 - DNA, 122 bp, Homo sapiens
  misc_feature (61)..(62): /note="This region represents a CpG dinucleotide"
  misc_feature (61)..(61): /note="Nucleotide may be methylated to form 5-methylcytosine"
tgtagtcagataaaaatcataaccctgagctaccatagccatctattaaattaaagacatcgttaaaaatatcacgctatccagtggcaatgaagggtgtggcaaactagctgggaactctg

SEQ ID NO: 25712 - DNA, 122 bp, Homo sapiens
  misc_feature (61)..(62): /note="This region represents a CpG dinucleotide"
  misc_feature (61)..(61): /note="Nucleotide may be methylated to form 5-methylcytosine"
gaagggctagtcctgagctttggaaatgagcatgctcactcactgactcgcattctctcacgtgcacacactctctctctctctctcaggctggattggccagaccaattggaggaacttgc

SEQ ID NO: 25713 - DNA, 122 bp, Homo sapiens
  misc_feature (61)..(62): /note="This region represents a CpG dinucleotide"
  misc_feature (61)..(61): /note="Nucleotide may be methylated to form 5-methylcytosine"
gtccaataagcaacatctagctccacacagaaccagcagggggaattcagacattcatatcgtatgattggcttctgtacatctctggaagttataccaagaatcccaaggtcattagagct

SEQ ID NO: 25714 - DNA, 122 bp, Homo sapiens
  misc_feature (61)..(62): /note="This region represents a CpG dinucleotide"
  misc_feature (61)..(61): /note="Nucleotide may be methylated to form 5-methylcytosine"
actccaacaacctagatcatagattctcagtgcccttcggccgagtacataggacaggcacgagcagaatgaaaagtatataagactggtatgagattgccagcgttttattttgccaaata

SEQ ID NO: 25715 - DNA, 122 bp, Homo sapiens
  misc_feature (61)..(62): /note="This region represents a CpG dinucleotide"
  misc_feature (61)..(61): /note="Nucleotide may be methylated to form 5-methylcytosine"
tggtataagttgctaagtaatcattaattcaactcgataaacctggtgggttttgtgtttcgttcgtgtcatttgtgaagcccgacaggaagagtggagccctgcgctgtgtgcgtgcgttt

SEQ ID NO: 25716 - DNA, 122 bp, Homo sapiens
  misc_feature (61)..(62): /note="This region represents a CpG dinucleotide"
  misc_feature (61)..(61): /note="Nucleotide may be methylated to form 5-methylcytosine"
gacaatgtgctgtctgataaacagactgcatcccccagtgtctgcctggagctcagccagcgtgtggcccgcctttgtcacaaggtgctgtttattctgcctggaagtccaaggacagaaca

SEQ ID NO: 25717 - DNA, 122 bp, Homo sapiens
  misc_feature (61)..(62): /note="This region represents a CpG dinucleotide"
  misc_feature (61)..(61): /note="Nucleotide may be methylated to form 5-methylcytosine"
ttagcaccatgtcacgtagcagacactctatacatgttagcagttatcctaatcatcatacgtacattccattttctaggggtgaccactgagttctgggtagattcattgagttgccaaag

SEQ ID NO: 25718 - DNA, 122 bp, Homo sapiens
  misc_feature (61)..(62): /note="This region represents a CpG dinucleotide"
  misc_feature (61)..(61): /note="Nucleotide may be methylated to form 5-methylcytosine"
aaacacggagttgtcagtgatattaacaagggacctaagaaactctccaaatcaggagcccgaggcccagggacagaacaagcttaaagggtaaagtgggcaccaaaaccaaagtcctactc

SEQ ID NO: 25719 - DNA, 122 bp, Homo sapiens
  misc_feature (61)..(62): /note="This region represents a CpG dinucleotide"
  misc_feature (61)..(61): /note="Nucleotide may be methylated to form 5-methylcytosine"
cccagagcctgactgcaccgtcccgctgccctgagggcctgggaggggcgcccctgagaacgagccctgtcttggcccttttacagtacaccaggggccagccagccacaggggccggggcc

SEQ ID NO: 25720 - DNA, 122 bp, Homo sapiens
  misc_feature (61)..(62): /note="This region represents a CpG dinucleotide"
  misc_feature (61)..(61): /note="Nucleotide may be methylated to form 5-methylcytosine"
tcgccccagagatcccagggaaggactctgtttcctgcgcgccactccagaaagttcctccggtgcccctggaggtcattctgccccacgtgcaatcctgtcctctccaccccatcacatgg

SEQ ID NO: 25721 - DNA, 122 bp, Homo sapiens
  misc_feature (61)..(62): /note="This region represents a CpG dinucleotide"
  misc_feature (61)..(61): /note="Nucleotide may be methylated to form 5-methylcytosine"
gggctccgcggcgcccccacccgcttcccctccaggccgttcctcccactgcggccgcagcgtccagccaggctccttcctggccctgaacacacggtgacattcctgcccacacgtccacc

SEQ ID NO: 25722 - DNA, 122 bp, Homo sapiens
  misc_feature (61)..(62): /note="This region represents a CpG dinucleotide"
  misc_feature (61)..(61): /note="Nucleotide may be methylated to form 5-methylcytosine"
agaaattgttgtacagcctgagtgaatttgcatgtgatagctatgtatacaattgtgtatcgcttatcttagaaggcatcataactagtagttcctgtgtggttatcatttttaccacagag

SEQ ID NO: 25723 - DNA, 122 bp, Homo sapiens
  misc_feature (61)..(62): /note="This region represents a CpG dinucleotide"
  misc_feature (61)..(61): /note="Nucleotide may be methylated to form 5-methylcytosine"
gaaagagagaaaatgtttccaaatcatgtatctgagaatggatatccagaataaagaactcgaactcaacaacaaagaatcccaaacaattggatgttaaaatgagcaaaggacttgaatag

SEQ ID NO: 25724 - DNA, 122 bp, Homo sapiens
  misc_feature (61)..(62): /note="This region represents a CpG dinucleotide"
  misc_feature (61)..(61): /note="Nucleotide may be methylated to form 5-methylcytosine"
aaaacaaacaaagaaaaaaaacaagggagcttgaaaactgagggatgctgtaggattctgcggcctgctaaccgattatgtgtattaatcagataggctaattgttgtaaccaccctctaat

SEQ ID NO: 25725 - DNA, 122 bp, Homo sapiens
  misc_feature (61)..(62): /note="This region represents a CpG dinucleotide"
  misc_feature (61)..(61): /note="Nucleotide may be methylated to form 5-methylcytosine"
ggaattaaaagcacgagataaacctgaagttctgtatcttgtcagccttagtctagcgtccgccaggtcaaatctaccgtctattataaacatccgccttttcataatacataacactactg

SEQ ID NO: 25726 - DNA, 122 bp, Homo sapiens
  misc_feature (61)..(62): /note="This region represents a CpG dinucleotide"
  misc_feature (61)..(61): /note="Nucleotide may be methylated to form 5-methylcytosine"
agcagagagtagatatatcataaaatatctaactacgtaactacttggggcacatagtgacgtgtgatacccatggggcttgaaaggattttgcaagttagcacaagctagccattgggtga

SEQ ID NO: 25727 - DNA, 122 bp, Homo sapiens
  misc_feature (61)..(62): /note="This region represents a CpG dinucleotide"
  misc_feature (61)..(61): /note="Nucleotide may be methylated to form 5-methylcytosine"
actacttttgaggtatgatatcttcctccctgagagagtgcaataaattttgggcttcctcgttttatagcttctaatgggcactaagagaacattagttggtttaattaaaatggcacaca

SEQ ID NO: 25728 - DNA, 122 bp, Homo sapiens
  misc_feature (61)..(62): /note="This region represents a CpG dinucleotide"
  misc_feature (61)..(61): /note="Nucleotide may be methylated to form 5-methylcytosine"
cagcctctgaagattcagaggaatccagggaatcaaaccggttagaggtatgcagccaggcggctccatcccatgtgtcaggttccaggttttacataccagggccctgatcattgcataac

SEQ ID NO: 25729 - DNA, 122 bp, Homo sapiens
  misc_feature (61)..(62): /note="This region represents a CpG dinucleotide"
  misc_feature (61)..(61): /note="Nucleotide may be methylated to form 5-methylcytosine"
accaggttcttcattgtgttgtctttctgccagagacactgtttacttaagtgtaggctacgaggaaataactacactcagggacctgaagtttttgtgactaacagaagagttcatgttat

SEQ ID NO: 25730 - DNA, 122 bp, Homo sapiens
  misc_feature (61)..(62): /note="This region represents a CpG dinucleotide"
  misc_feature (61)..(61): /note="Nucleotide may be methylated to form 5-methylcytosine"
gtaattttttcttgctttctgaatattgaccttaagtagtccattattgactgtgaaatacgtgcacgtgaggccattcttccatgttagtagcaatttattgtgcagtacttgtacctatt

SEQ ID NO: 25731 - DNA, 122 bp, Homo sapiens
  misc_feature (61)..(62): /note="This region represents a CpG dinucleotide"
  misc_feature (61)..(61): /note="Nucleotide may be methylated to form 5-methylcytosine"
aggttggtcataggctgtgattttagcccccggcaagtgtgagtgaagcatctgtaccaccgcgcaggctgagcgcctgcgcagggtaaggtgccacctggcagtggggcacacagagggaa

SEQ ID NO: 25732 - DNA, 122 bp, Homo sapiens
  misc_feature (61)..(62): /note="This region represents a CpG dinucleotide"
  misc_feature (61)..(61): /note="Nucleotide may be methylated to form 5-methylcytosine"
ttgcctctgaaatggggatcacaggaattcctgccaggcaggggatatgtgaagactgaacgaaatgattcacacaaagatgtagcccagtgcctgggggacactaagcacatgctgagcct

SEQ ID NO: 25733 - DNA, 122 bp, Homo sapiens
  misc_feature (61)..(62): /note="This region represents a CpG dinucleotide"
  misc_feature (61)..(61): /note="Nucleotide may be methylated to form 5-methylcytosine"
gctgcctccttcctggcgtttctgacactctcaggatgtgggttttcacactgtgtctgccgcacagtaatacacggccgtgtcctcggatctcaggctgctcagctccatgtaggctgtgc

SEQ ID NO: 25734 - DNA, 122 bp, Homo sapiens
  misc_feature (61)..(62): /note="This region represents a CpG dinucleotide"
  misc_feature (61)..(61): /note="Nucleotide may be methylated to form 5-methylcytosine"
tccccagatggggtgagggtgggctggtgcagtggcccagccttggggcgtcaggtaggccgccaacccttgagttgagtcacatagggaaggcaccgggaaggaggcattgcaacagagga

SEQ ID NO: 25735 - DNA, 122 bp, Homo sapiens
  misc_feature (61)..(62): /note="This region represents a CpG dinucleotide"
  misc_feature (61)..(61): /note="Nucleotide may be methylated to form 5-methylcytosine"
caggacctcatatccttgtcaacagggctgcaggcagccacatggagtcctaggagttcacggtacagatggactctgtttgctgaggtgacttctcagtagtttcactctagctctacaca

SEQ ID NO: 25736 - DNA, 122 bp, Homo sapiens
  misc_feature (61)..(62): /note="This region represents a CpG dinucleotide"
  misc_feature (61)..(61): /note="Nucleotide may be methylated to form 5-methylcytosine"
tcttggcaccagtctaagcagcacttcaccctccctcctcaggagctggagtatcagaggcgccaggtacgggagcccagtgacaagtttgtccctgtcatgagcgacttcatcacggtgtc

SEQ ID NO: 25737 - DNA, 122 bp, Homo sapiens
  misc_feature (61)..(62): /note="This region represents a CpG dinucleotide"
  misc_feature (61)..(61): /note="Nucleotide may be methylated to form 5-methylcytosine"
tgaagttgtgacttgtgcggccacagttcacactcatgcgtgtgtccctgtcggggctgacggggcctgagtcccctgggcactgctgggcggggcccatgtcgtacgggttggggtgacgc

SEQ ID NO: 25738 - DNA, 122 bp, Homo sapiens
  misc_feature (61)..(62): /note="This region represents a CpG dinucleotide"
  misc_feature (61)..(61): /note="Nucleotide may be methylated to form 5-methylcytosine"
caccagcaaattcagtgtctggtgaggtcatgcttcctggttcacagatggctttctcaccgtgtcctcacatggcccaagagacaaaggaactctcctccccattgtctctctctggtctt

SEQ ID NO: 25739 - DNA, 122 bp, Homo sapiens
  misc_feature (61)..(62): /note="This region represents a CpG dinucleotide"
  misc_feature (61)..(61): /note="Nucleotide may be methylated to form 5-methylcytosine"
aaatttgcatgtcatttttgcagaggcgccatgctaatctctatattgttccaactttagcgtatatgatgctaaaattgagcaccagtgtgatccttttaagcagaaatcagatcatgtca

SEQ ID NO: 25740 - DNA, 122 bp, Homo sapiens
  misc_feature (61)..(62): /note="This region represents a CpG dinucleotide"
  misc_feature (61)..(61): /note="Nucleotide may be methylated to form 5-methylcytosine"
agctacgggctccctttgcaagcagtgctgctcttctgagcacactgtgctctccaaggacggagagttgtgggagcaaatgctgattttctttctagcagaagtcttgtctgattgataga

SEQ ID NO: 25741 - DNA, 122 bp, Homo sapiens
  misc_feature (61)..(62): /note="This region represents a CpG dinucleotide"
  misc_feature (61)..(61): /note="Nucleotide may be methylated to form 5-methylcytosine"
ctgagctttggtgtgcccacactgaccagtcatcggaagtgggctatccctggggacacgcgaaccttagcctacggcagtacccagggagtgactcagccatgagccatcagcaggcaaca

SEQ ID NO: 25742 - DNA, 122 bp, Homo sapiens
  misc_feature (61)..(62): /note="This region represents a CpG dinucleotide"
  misc_feature (61)..(61): /note="Nucleotide may be methylated to form 5-methylcytosine"
taccaagcgttataaacagcatgtgatccatgggtctgctatcaaaacaaatacatttcacgagatgtgaagcgtcatttaacttgagcaatgacttgagattattacttagggtttagatg

SEQ ID NO: 25743 - DNA, 122 bp, Homo sapiens
  misc_feature (61)..(62): /note="This region represents a CpG dinucleotide"
  misc_feature (61)..(61): /note="Nucleotide may be methylated to form 5-methylcytosine"
catcacagagagcaatgcatagaaccaagtggaaagtccaaagcaaatcatgagtcgaaacgggcccagtgaacaggaaaatccagatgtggatttggcaaccaatggagcaagcagagccc

SEQ ID NO: 25744 - DNA, 122 bp, Homo sapiens
  misc_feature (61)..(62): /note="This region represents a CpG dinucleotide"
  misc_feature (61)..(61): /note="Nucleotide may be methylated to form 5-methylcytosine"
tcttgccttgtggagtaaagtatttgttcaataaacaaataggaaggccattttctgctgcgatcaaaaactgttttaagcttctttggagaaatatatatcaggctgtggttgaatcttgg

SEQ ID NO: 25745 - DNA, 122 bp, Homo sapiens
  misc_feature (61)..(62): /note="This region represents a CpG dinucleotide"
  misc_feature (61)..(61): /note="Nucleotide may be methylated to form 5-methylcytosine"
gtggcactttttgttaagagggagaaagggcacaaatcagagccagaaagatttgcatctcgatgtattgttaaaatgcttttattttatgtaaatagtgtcaggtgaatcaagcaagcata

SEQ ID NO: 25746 - DNA, 122 bp, Homo sapiens
  misc_feature (61)..(62): /note="This region represents a CpG dinucleotide"
  misc_feature (61)..(61): /note="Nucleotide may be methylated to form 5-methylcytosine"
tgtgcgaagaccacgcatgcacacaccttgtgtaggggctatacctaaacataaaatctgcggaaacaccactggaacagcatgcataggcacataaaacgtgtgtgtccaaatattcactt

SEQ ID NO: 25747 - DNA, 122 bp, Homo sapiens
  misc_feature (61)..(62): /note="This region represents a CpG dinucleotide"
  misc_feature (61)..(61): /note="Nucleotide may be methylated to form 5-methylcytosine"
tgaaatatatccattttttgctgaaatatgagctgccttgttctcccagtgagcaggttacgtttagctcagcgatgccacaccctgacctgtgcactgccaggggtcacttgaacctaagc

SEQ ID NO: 25748 - DNA, 122 bp, Homo sapiens
  misc_feature (61)..(62): /note="This region represents a CpG dinucleotide"
  misc_feature (61)..(61): /note="Nucleotide may be methylated to form 5-methylcytosine"
gtcactcactgactccatgaggattttttcacacatcattgcaacacaggcagtgactgacgccaccacctttgccctggaggctggtttctgggccctgccggtgcgggacataaaggccg

SEQ ID NO: 25749 - DNA, 122 bp, Homo sapiens
  misc_feature (61)..(62): /note="This region represents a CpG dinucleotide"
  misc_feature (61)..(61): /note="Nucleotide may be methylated to form 5-methylcytosine"
tttctgttaaaacattcttttaatggaagaagggggggaaaagcagcccagaaaaaattacgcaaatggcaaggtagtgacaaggcatctatcaaagtggctctggaaattccaatttttaa

SEQ ID NO: 25750 - DNA, 122 bp, Homo sapiens
  misc_feature (61)..(62): /note="This region represents a CpG dinucleotide"
  misc_feature (61)..(61): /note="Nucleotide may be methylated to form 5-methylcytosine"
tggggcctggtgggaggtaattgtaacataggggtgggtccctcatgaatggcttagcaccgtctccttggtgatgaatgaggtcttgctcagagttcatgtgagatctggatgtttaaagg

SEQ ID NO: 25751 - DNA, 122 bp, Homo sapiens
  misc_feature (61)..(62): /note="This region represents a CpG dinucleotide"
  misc_feature (61)..(61): /note="Nucleotide may be methylated to form 5-methylcytosine"
gagacctgaatgactcaacaagcaaggactgagcacctttcgcaggctggccctgtgctgcgtgccagactgaacatgatggacgggtcccaactggatggcacttagagttggataaccat

SEQ ID NO: 25752 - DNA, 122 bp, Homo sapiens
  misc_feature (61)..(62): /note="This region represents a CpG dinucleotide"
  misc_feature (61)..(61): /note="Nucleotide may be methylated to form 5-methylcytosine"
gatctagtgtggactaggtacccctcttccccagtgtttacactacttataaattagttgcgtttgagaaactacataaaaaacctggagatttcacctatagatctggatttctggcttct

SEQ ID NO: 25753 - DNA, 122 bp, Homo sapiens
  misc_feature (61)..(62): /note="This region represents a CpG dinucleotide"
  misc_feature (61)..(61): /note="Nucleotide may be methylated to form 5-methylcytosine"
gatgacattggcaaacaaattcaagcactgctttcaaaccttttctgcagagaaggtgtgcgccacatttacacatacatgtacacacatgtgcctgcctccccgccccaccctaccccagg

SEQ ID NO: 25754 - DNA, 122 bp, Homo sapiens
  misc_feature (61)..(62): /note="This region represents a CpG dinucleotide"
  misc_feature (61)..(61): /note="Nucleotide may be methylated to form 5-methylcytosine"
aaagcctaatcaacacttctgtgaggaagttagcagccttccttctgacctgactgcttccgcttctggtggtggcagcgctgtcaagcctcattactggaaagttcatcttgttaaatttc

SEQ ID NO: 25755 - DNA, 122 bp, Homo sapiens
  misc_feature (61)..(62): /note="This region represents a CpG dinucleotide"
  misc_feature (61)..(61): /note="Nucleotide may be methylated to form 5-methylcytosine"
gacctgagcgtccaactgcaactgtatgttccggcagctttaataggactctgtgctgcccgtattattcatagcagttgttaatgtgcctctctccttgggatcctggggtgactgaaggg

SEQ ID NO: 25756 - DNA, 122 bp, Homo sapiens
  misc_feature (61)..(62): /note="This region represents a CpG dinucleotide"
  misc_feature (61)..(61): /note="Nucleotide may be methylated to form 5-methylcytosine"
ctgcacaagcaacttcctgtctcctcaaaggagataaatgatcctaattcactttaatgccggaagaaggaggttctgtgtcattctaataagcctcaaactcctggtactatttttacccc

SEQ ID NO: 25757 - DNA, 122 bp, Homo sapiens
  misc_feature (61)..(62): /note="This region represents a CpG dinucleotide"
  misc_feature (61)..(61): /note="Nucleotide may be methylated to form 5-methylcytosine"
ctttgtaaattaaatagctattattttttcaaacctgtcaggatatgcttatgcagttgacgcacacgtgatcatagtcatgttcactgtgtctaaaagtgagaaaaatagaatccattttg

SEQ ID NO: 25758 - DNA, 122 bp, Homo sapiens
  misc_feature (61)..(62): /note="This region represents a CpG dinucleotide"
  misc_feature (61)..(61): /note="Nucleotide may be methylated to form 5-methylcytosine"
tatggaatatgttcaaagtgatgacattgtattacttctgtgcatggacaggaactagaacggctaataaaattgttgtcaggtagaagttctgaagagcctgacatgataaaaagataagg

SEQ ID NO: 25759 - DNA, 122 bp, Homo sapiens
  misc_feature (61)..(62): /note="This region represents a CpG dinucleotide"
  misc_feature (61)..(61): /note="Nucleotide may be methylated to form 5-methylcytosine"
atgcctattattgatgtcatcagaaattacccttttggtgatagtacaagtgcttcattacgcaggttaacaggaaaagtgaagcaggtgtggtagttaatccacaaaatccatattggctc

SEQ ID NO: 25760 - DNA, 122 bp, Homo sapiens
  misc_feature (61)..(62): /note="This region represents a CpG dinucleotide"
  misc_feature (61)..(61): /note="Nucleotide may be methylated to form 5-methylcytosine"
aacttgtccaaaggcacagtcatagaactagggcttacaccagctgtgtctaatagcatgcgtgccccctctgctgtgcttttatttgcttcttggagtgctgtttagagaaattgatggtt

SEQ ID NO: 25761 - DNA, 122 bp, Homo sapiens
  misc_feature (61)..(62): /note="This region represents a CpG dinucleotide"
  misc_feature (61)..(61): /note="Nucleotide may be methylated to form 5-methylcytosine"
agtccatggtattttgtgctggcagcctgagcttactcacacactgcatgagtaagcatacgtctccactaggtgtctgcagtactagtgataactgtaagaacttagattcaccatgcagt

SEQ ID NO: 25762 - DNA, 122 bp, Homo sapiens
  misc_feature (61)..(62): /note="This region represents a CpG dinucleotide"
  misc_feature (61)..(61): /note="Nucleotide may be methylated to form 5-methylcytosine"
cagaacagtcctgagtatctgctgaaggttcatcgctgaggatcctttctcagtctctggcgccttcctttacctccccaaagtagcccggagcctggagaacggggagatcttgattttca

SEQ ID NO: 25763 - DNA, 122 bp, Homo sapiens
  misc_feature (61)..(62): /note="This region represents a CpG dinucleotide"
  misc_feature (61)..(61): /note="Nucleotide may be methylated to form 5-methylcytosine"
atgtacatgccctggaagttgcttttccctggtctctgcattcaattaaccgtttagtgccgcaggtgtggaccataaggaaatggcctctccctggtgtcagctgccaatttatcactttt

SEQ ID NO: 25764 - DNA, 122 bp, Homo sapiens
  misc_feature (61)..(62): /note="This region represents a CpG dinucleotide"
  misc_feature (61)..(61): /note="Nucleotide may be methylated to form 5-methylcytosine"
ttgctaagagactaatgacatcctcagttccaatggccagctagaaagcctgagccttgacgtgttaatgcaatgattcaaccactgacgtggctcctcaccatccatcacccaaggcaaag

SEQ ID NO: 25765 - DNA, 122 bp, Homo sapiens
  misc_feature (61)..(62): /note="This region represents a CpG dinucleotide"
  misc_feature (61)..(61): /note="Nucleotide may be methylated to form 5-methylcytosine"
ggtcagagcagccatgctgggcaatgcagagggaagaaagcttctgtcacctgagggcttcgggcaggactgagaaatttcctgagcaggtactgcttccaactgattcactcggccacagc

SEQ ID NO: 25766 - DNA, 122 bp, Homo sapiens
  misc_feature (61)..(62): /note="This region represents a CpG dinucleotide"
  misc_feature (61)..(61): /note="Nucleotide may be methylated to form 5-methylcytosine"
gcaggaagctaaagaactggcgccagaaaaccactcccaggatgcctacttttcatgctgcgtgttttcatgtcaatacctcttcctgtggctttaagattggaactatttaaaaaatgtca

SEQ ID NO: 25767 - DNA, 122 bp, Homo sapiens
  misc_feature (61)..(62): /note="This region represents a CpG dinucleotide"
  misc_feature (61)..(61): /note="Nucleotide may be methylated to form 5-methylcytosine"
gtagcatccgcaaagtaattagcataatgtttcacaaaagtaggcactcgacgaatttgtcgttagctcatttcctcttgtattctatagaacacagatttcagcatgctaacaaaattaac

SEQ ID NO: 25768 - DNA, 122 bp, Homo sapiens
  misc_feature (61)..(62): /note="This region represents a CpG dinucleotide"
  misc_feature (61)..(61): /note="Nucleotide may be methylated to form 5-methylcytosine"
aaacctttcattgatagttccttttcatacatatgcatgagtaggaattacccaattttacgcatggagaatcttatgaactaagaaggggaaggaaataccattcatgctgcctagcttct

SEQ ID NO: 25769 - DNA, 122 bp, Homo sapiens
  misc_feature (61)..(62): /note="This region represents a CpG dinucleotide"
  misc_feature (61)..(61): /note="Nucleotide may be methylated to form 5-methylcytosine"
gaggctgtgtaacctgcttagttattcatctagctgtggtcaagatggacttcaaattcacgtataccactgtccatgactcatggtctcagacacaatggtttatgactaaggttctggga

SEQ ID NO: 25770 - DNA, 122 bp, Homo sapiens
  misc_feature (61)..(62): /note="This region represents a CpG dinucleotide"
  misc_feature (61)..(61): /note="Nucleotide may be methylated to form 5-methylcytosine"
aactgtgactgttagcaatgaaaaaaatgtgacgatctgcagagagggaaagtgactaaacgtaatggcttgaggttcgaagggtaatggctacatatctacatggtgactaaatctacatg

SEQ ID NO: 25771 - DNA, 122 bp, Homo sapiens
  misc_feature (61)..(62): /note="This region represents a CpG dinucleotide"
  misc_feature (61)..(61): /note="Nucleotide may be methylated to form 5-methylcytosine"
gaaggaaggtgcaagggtctccaggaaaggctggctacgtcctcctcagaaagaggctgtcgggcctctgagaacaatctgaacatgaggaactgaaactgaaacagagagtgacccggccg

SEQ ID NO: 25772 - DNA, 122 bp, Homo sapiens
  misc_feature (61)..(62): /note="This region represents a CpG dinucleotide"
  misc_feature (61)..(61): /note="Nucleotide may be methylated to form 5-methylcytosine"
cagcatgagaaacaagaactcttggtcaagaactgagttcagattccaatacttccatctcgagaggacctgtcattttattataaacacttaacagagagaagggcaatctgcctagtata

SEQ ID NO: 25773 - DNA, 122 bp, Homo sapiens
  misc_feature (61)..(62): /note="This region represents a CpG dinucleotide"
  misc_feature (61)..(61): /note="Nucleotide may be methylated to form 5-methylcytosine"
gccacatggagttaggactatcatgactaaattgtcctggaaccctaagtcctgggaccccgtgaagagatctagtggcagggaggatgaggactgggatgagtccatagaggttcccatcc

SEQ ID NO: 25774 - DNA, 122 bp, Homo sapiens
  misc_feature (61)..(62): /note="This region represents a CpG dinucleotide"
  misc_feature (61)..(61): /note="Nucleotide may be methylated to form 5-methylcytosine"
tcccaactccacccagggatcctggtgtacgggctgagcctgttatgcttttctgcccttcggccctttggggagccacggcgggaggtggagatccaccggcgatatgtggcccagtcggt

SEQ ID NO: 25775 - DNA, 122 bp, Homo sapiens
  misc_feature (61)..(62): /note="This region represents a CpG dinucleotide"
  misc_feature (61)..(61): /note="Nucleotide may be methylated to form 5-methylcytosine"
ttcttcaccattgttgtggtgttagcatgtctggtccaatagcattcagtccacccactacgcatacagacaataaccagagagaaaagcctaaagctggaagtgaatctataaagtctatc

SEQ ID NO: 25776 - DNA, 122 bp, Homo sapiens
  misc_feature (61)..(62): /note="This region represents a CpG dinucleotide"
  misc_feature (61)..(61): /note="Nucleotide may be methylated to form 5-methylcytosine"
ggggctgggtgagctggttccacaagatggtttctgcttgacctgggcagctgagccggacgtgggctgtgggtacccaaccgtttggattctcagcagagccctggggaagggaggcactg

SEQ ID NO: 25777 - DNA, 122 bp, Homo sapiens
  misc_feature (61)..(62): /note="This region represents a CpG dinucleotide"
  misc_feature (61)..(61): /note="Nucleotide may be methylated to form 5-methylcytosine"
actttttacagccttacaaaaaccctaaggtggttgctacagaatcgtaacccagcttgacgagtgagtatactgaggtttagtgaagtacctgattaagaatacagttaaccagctgcaga

SEQ ID NO: 25778 - DNA, 122 bp, Homo sapiens
  misc_feature (61)..(62): /note="This region represents a CpG dinucleotide"
  misc_feature (61)..(61): /note="Nucleotide may be methylated to form 5-methylcytosine"
ggcaggcagtataatttggtatgactgtatcagttaaggttcttcccaggatgaaacagacggtatgtgcaaagactttaactgaagccttcaagtgaaggaacaatttacaggggtgtgga

SEQ ID NO: 25779 - DNA, 122 bp, Homo sapiens
  misc_feature (61)..(62): /note="This region represents a CpG dinucleotide"
  misc_feature (61)..(61): /note="Nucleotide may be methylated to form 5-methylcytosine"
cctctattagccagtgcaggagagtcctcatccccgtcacatttagggcctttcccaggacggctcccagggctctccagcaggtctggctggcacctcatgacatcagcctcctctggggc

SEQ ID NO: 25780 - DNA, 122 bp, Homo sapiens
  misc_feature (61)..(62): /note="This region represents a CpG dinucleotide"
  misc_feature (61)..(61): /note="Nucleotide may be methylated to form 5-methylcytosine"
cctgggcagtgggaggtgtctagagcagtttcgtcctgtgaatcataggacagcatggtgcgtagtttgctggcctgaggcccaatatggaatgagcctctgagatgtgtcatcatcagctt

SEQ ID NO: 25781 - DNA, 122 bp, Homo sapiens
  misc_feature (61)..(62): /note="This region represents a CpG dinucleotide"
  misc_feature (61)..(61): /note="Nucleotide may be methylated to form 5-methylcytosine"
atagtcccaggagatcctgagaacacgtgctcaaactggtggtgctacagcttttggtttcgtacgttttagggagacataagccataaatcaatacatgtaagatgtaacattggttccgg

SEQ ID NO: 25782 - DNA, 122 bp, Homo sapiens
  misc_feature (61)..(62): /note="This region represents a CpG dinucleotide"
  misc_feature (61)..(61): /note="Nucleotide may be methylated to form 5-methylcytosine"
gcagtggcgcgatctcggctcagttgggcactaattttcatttgatgaacgcctctccttcgtatattgttaaaactaccaccatgatccagggggagataaaagaaatcctaaatccagct

SEQ ID NO: 25783 - DNA, 122 bp, Homo sapiens
  misc_feature (61)..(62): /note="This region represents a CpG dinucleotide"
  misc_feature (61)..(61): /note="Nucleotide may be methylated to form 5-methylcytosine"
ccggccgagggacccacccaaggccacacagggaggcggcctcaggatcatgggcagctccgtctggttccttcccaggctccgggccatatcatcagcaccctcccctcatcctgccccgc

SEQ ID NO: 25784 - DNA, 122 bp, Homo sapiens
  misc_feature (61)..(62): /note="This region represents a CpG dinucleotide"
  misc_feature (61)..(61): /note="Nucleotide may be methylated to form 5-methylcytosine"
gacctgacctcccttcaaaatatgaaacagatgggcccaactagaattctccagctattccggacattattgtcaaggtttctcacattctaaaacctggtgagatgaggctagctcttgaa

SEQ ID NO: 25785 - DNA, 122 bp, Homo sapiens
  misc_feature (61)..(62): /note="This region represents a CpG dinucleotide"
  misc_feature (61)..(61): /note="Nucleotide may be methylated to form 5-methylcytosine"
cttagtacaaatcctggcaactaaatgaaagaacaaacaacctggggttctgggatggttcgtctttgctgatggcactgtgttccaaaatggccaaggtcaaatataaaaatttcagactg

SEQ ID NO: 25786 - DNA, 122 bp, Homo sapiens
  misc_feature (61)..(62): /note="This region represents a CpG dinucleotide"
  misc_feature (61)..(61): /note="Nucleotide may be methylated to form 5-methylcytosine"
gaagataatgcgtttgagatgccaatgtgaagtgccaatttgagtcacagctagaaattccggttttgagcaatggatggatatatctgaactggagatacaagtctgggagtcatcaatgc

SEQ ID NO: 25787 - DNA, 122 bp, Homo sapiens
  misc_feature (61)..(62): /note="This region represents a CpG dinucleotide"
  misc_feature (61)..(61): /note="Nucleotide may be methylated to form 5-methylcytosine"
agttcagcgtgtatccatcctgactcctccaataaatgcagaaacttgtatgtctctccccgacaactggattatcatatacattattcaagcataggctttagactcagacatatctacat

SEQ ID NO: 25788 - DNA, 122 bp, Homo sapiens
  misc_feature (61)..(62): /note="This region represents a CpG dinucleotide"
  misc_feature (61)..(61): /note="Nucleotide may be methylated to form 5-methylcytosine"
tctgcagcttttttttcccccttttaagttctgtatggcaggaaaatgcttgagagtgtccgtgtccatatagatacccacagtcacttgtgatattgtggctgcaggaagggtgctccacg

SEQ ID NO: 25789 - DNA, 122 bp, Homo sapiens
  misc_feature (61)..(62): /note="This region represents a CpG dinucleotide"
  misc_feature (61)..(61): /note="Nucleotide may be methylated to form 5-methylcytosine"
actttttttttatacctatcactgaacaggactatttgaactattaatatctagaataatcggtaacataaccataaactcctgttcttaccctcaccaagttaaatgttttgactgaataa

SEQ ID NO: 25790 - DNA, 122 bp, Homo sapiens
  misc_feature (61)..(62): /note="This region represents a CpG dinucleotide"
  misc_feature (61)..(61): /note="Nucleotide may be methylated to form 5-methylcytosine"
cagatatcagccaggcccagattcgaggcatagctccattacttagtggctttgacttaccgtgtaagactccatttcctcatctgtaaaatgaggagaaccggccagccgggcgcagtgac

SEQ ID NO: 25791 - DNA, 122 bp, Homo sapiens
  misc_feature (61)..(62): /note="This region represents a CpG dinucleotide"
  misc_feature (61)..(61): /note="Nucleotide may be methylated to form 5-methylcytosine"
ggacagaaaccattccctctaaaaaaatcgtttactttgacgataggtagcaacgaagcacggaagaatcttgaccctttgaggaacccgtaactgacgcaagtgccataaatgctactttg

SEQ ID NO: 25792 - DNA, 122 bp, Homo sapiens
  misc_feature (61)..(62): /note="This region represents a CpG dinucleotide"
  misc_feature (61)..(61): /note="Nucleotide may be methylated to form 5-methylcytosine"
gtctttgtattctttggctttatagagacaatgaagccacaggagtttttccaagctgttcggaacatgtcccatttgctatccttccttctttgctgttcttatattcctcccccagcctc

SEQ ID NO: 25793 - DNA, 122 bp, Homo sapiens
  misc_feature (61)..(62): /note="This region represents a CpG dinucleotide"
  misc_feature (61)..(61): /note="Nucleotide may be methylated to form 5-methylcytosine"
tggagaagaagtagtttgcactacagagtttagcgcgagagctttctctttttctaaccacgaaatcaatcatttgtccagactgtgggagtcagagttagttactgaaaagagctccgtat

SEQ ID NO: 25794 - DNA, 122 bp, Homo sapiens
  misc_feature (61)..(62): /note="This region represents a CpG dinucleotide"
  misc_feature (61)..(61): /note="Nucleotide may be methylated to form 5-methylcytosine"
cgtccctctcagtggcgccgctgagtgaggcggaagggccggcgggtggcgggtggcgggcggcgggcagtggccgggcgctgaggccagaggggcggagcggccgagctgctggggcgggg

SEQ ID NO: 25795 - DNA, 122 bp, Homo sapiens
  misc_feature (61)..(62): /note="This region represents a CpG dinucleotide"
  misc_feature (61)..(61): /note="Nucleotide may be methylated to form 5-methylcytosine"
gaggaacatgagcacgcgtggccatggggagcgtcggcacggctagaaatgcctgattctcggtgtgtgtgtctaccccaggcagcaacggcaaatgcccttctcgccacggccgtggtccc

SEQ ID NO: 25796 - DNA, 122 bp, Homo sapiens
  misc_feature (61)..(62): /note="This region represents a CpG dinucleotide"
  misc_feature (61)..(61): /note="Nucleotide may be methylated to form 5-methylcytosine"
gaggcaatcaacactgtaactctgaatcatagccctcttttggacaaaggaaaagtagctcggagctctgagactagactctgagctgttcacattcaatgctgaattaaatgtcaaatttc

SEQ ID NO: 25797 - DNA, 122 bp, Homo sapiens
  misc_feature (61)..(62): /note="This region represents a CpG dinucleotide"
  misc_feature (61)..(61): /note="Nucleotide may be methylated to form 5-methylcytosine"
agatgaagacactgagggtcagagtggtgatgtgtcaggaaccctcccactgggttctcacgcttgaaacacagattgctggtccccacccacacagtttctgatgcagtaggtctgggtgg

SEQ ID NO: 25798 - DNA, 122 bp, Homo sapiens
  misc_feature (61)..(62): /note="This region represents a CpG dinucleotide"
  misc_feature (61)..(61): /note="Nucleotide may be methylated to form 5-methylcytosine"
caccttagaccacaggaaatgtctggttaacacacgaagagatggaaacgctcgcagccacgccgcaaacggttagtcacgccccacagcctgcactcctcccagcgcgttttccacttaag

SEQ ID NO: 25799 - DNA, 122 bp, Homo sapiens
  misc_feature (61)..(62): /note="This region represents a CpG dinucleotide"
  misc_feature (61)..(61): /note="Nucleotide may be methylated to form 5-methylcytosine"
atcgtgtgtccggagaggctggttctttgatttgtagatgactcatttcaggctcttgaacgagactgagactgcacatgtaccaaatgtcaccatgtccacccagagggcttgtttgtgct

SEQ ID NO: 25800 - DNA, 122 bp, Homo sapiens
  misc_feature (61)..(62): /note="This region represents a CpG dinucleotide"
  misc_feature (61)..(61): /note="Nucleotide may be methylated to form 5-methylcytosine"
cagacccaggcagagagagcaaaggaggctgtggtggcccccgacgggaacctgggtggccgggggacacaccgaggaactttccgccccccgacgggctctcccaccgaggctcaggtgct

SEQ ID NO: 25801 - DNA, 122 bp, Homo sapiens
  misc_feature (61)..(62): /note="This region represents a CpG dinucleotide"
  misc_feature (61)..(61): /note="Nucleotide may be methylated to form 5-methylcytosine"
ctaatacctccttagtcacataacagctgttccctgggtctctcctatagtgctgtgacacgtttgtacccagcaaggaaatcatatccctcagtcatcattactttagttctaatcatttg

SEQ ID NO: 25802 - DNA, 122 bp, Homo sapiens
  misc_feature (61)..(62): /note="This region represents a CpG dinucleotide"
  misc_feature (61)..(61): /note="Nucleotide may be methylated to form 5-methylcytosine"
aaaaaatatggcccaagatttacaaaaatatccctaaaacattccacatgcgtctcaaggcggagggtaattgttatgaacaaatccacacaaactcttgtgccaagagcaacaagttgagg

SEQ ID NO: 25803 - DNA, 122 bp, Homo sapiens
  misc_feature (61)..(62): /note="This region represents a CpG dinucleotide"
  misc_feature (61)..(61): /note="Nucleotide may be methylated to form 5-methylcytosine"
cacgtggcctcccgggttcagacaccctaggctgatgctgtggttccatgtgcctgaacacgagcatccgaactcatttccggcctgcctgtccccccatgcaacggctcctgaaaaagggg

SEQ ID NO: 25804 - DNA, 122 bp, Homo sapiens
  misc_feature (61)..(62): /note="This region represents a CpG dinucleotide"
  misc_feature (61)..(61): /note="Nucleotide may be methylated to form 5-methylcytosine"
gcgcccggtctcaccagtctactttctatctctacgattgtgactaagtacctcatataacgggagtcatgctgtatttatcatacagtatttgtctttgttgtgactagcttattgcactt

SEQ ID NO: 25805 - DNA, 122 bp, Homo sapiens
  misc_feature (61)..(62): /note="This region represents a CpG dinucleotide"
  misc_feature (61)..(61): /note="Nucleotide may be methylated to form 5-methylcytosine"
aagcagggtgccacggcctgacagtaacaatcaaacaggagggttttccaatgccatgaacgtaaatcgaggtgtgcatgataacaaggagtaggaaccggagggacggccactgagggtgg

SEQ ID NO: 25806 - DNA, 122 bp, Homo sapiens
  misc_feature (61)..(62): /note="This region represents a CpG dinucleotide"
  misc_feature (61)..(61): /note="Nucleotide may be methylated to form 5-methylcytosine"
tccttctgccctctcttccttgatcacaacaaaagtgttctcttcttgaacttctgggagcgttctcttgttctcagttctttagacatgcctttttttggctagaaagttctttcctccca

SEQ ID NO: 25807 - DNA, 122 bp, Homo sapiens
  misc_feature (61)..(62): /note="This region represents a CpG dinucleotide"
  misc_feature (61)..(61): /note="Nucleotide may be methylated to form 5-methylcytosine"
caagaatgtgtgaagcaaaagaactttcatactgtttactatgtaaagtgaggggattcgcgttaatctgtaacttttggttggactatcctgaatcttaaagacaggaagactcaagtttg

SEQ ID NO: 25808 - DNA, 122 bp, Homo sapiens
  misc_feature (61)..(62): /note="This region represents a CpG dinucleotide"
  misc_feature (61)..(61): /note="Nucleotide may be methylated to form 5-methylcytosine"
gcctgccgtttggccccgctgaggccccacaggtccggaaccgtcgcaccaccatcagagcggctgtgctctcctgagcagggccagactactcggagatcccgactgacaccttttcctgg

SEQ ID NO: 25809 - DNA, 122 bp, Homo sapiens
  misc_feature (61)..(62): /note="This region represents a CpG dinucleotide"
  misc_feature (61)..(61): /note="Nucleotide may be methylated to form 5-methylcytosine"
gctttcatagctaggcatttaacagtcattttgtgtcagttgcttcctttatacatgtcacgtggcacatttttcagttttctgtatttctgagaccttaatcccaatcactcttaaatgct

SEQ ID NO: 25810 - DNA, 122 bp, Homo sapiens
  misc_feature (61)..(62): /note="This region represents a CpG dinucleotide"
  misc_feature (61)..(61): /note="Nucleotide may be methylated to form 5-methylcytosine"
tccaggaggcaggcatcctctcccacagctactgaggaagtggttaacttcagtgtagctcggctcaactcagacaagccaggggtagccaaccggtactattcagagttgtgcataatgcc

SEQ ID NO: 25811 - DNA, 122 bp, Homo sapiens
  misc_feature (61)..(62): /note="This region represents a CpG dinucleotide"
  misc_feature (61)..(61): /note="Nucleotide may be methylated to form 5-methylcytosine"
ctacctctggtcttcctcattgctcattattcgctaattacaatgcattctcatgctaaacgacactcctaccagcaccatgacagtttataaataccatggcaacatttagaagttaccct

SEQ ID NO: 25812 - DNA, 122 bp, Homo sapiens
  misc_feature (61)..(62): /note="This region represents a CpG dinucleotide"
  misc_feature (61)..(61): /note="Nucleotide may be methylated to form 5-methylcytosine"
ttctagcagctcagctctccacttcctcctctgtgcagtgggaaaatgaagcccagtttacgtgttgttattatagagaccaaatgagataaaaggtgtgaaagtgttttttactttttaat

SEQ ID NO: 25813 - DNA, 122 bp, Homo sapiens
  misc_feature (61)..(62): /note="This region represents a CpG dinucleotide"
  misc_feature (61)..(61): /note="Nucleotide may be methylated to form 5-methylcytosine"
tggtgagtagtgttgctgaatatgccgtgtgtcctattaactctgtgacggccacagtcacgtctcctttctgcctcctcctcctcctcctctctgtccagtgactagggagggcaggaagt

SEQ ID NO: 25814 - DNA, 122 bp, Homo sapiens
  misc_feature (61)..(62): /note="This region represents a CpG dinucleotide"
  misc_feature (61)..(61): /note="Nucleotide may be methylated to form 5-methylcytosine"
tcagctcctctcctccctgaaccccgacagcgaggtgtcttacgcttcggcattctcactcgcctgactcagacttgttagttttccagagcaactcatgtggccgccgtctagggagttta

SEQ ID NO: 25815 - DNA, 122 bp, Homo sapiens
  misc_feature (61)..(62): /note="This region represents a CpG dinucleotide"
  misc_feature (61)..(61): /note="Nucleotide may be methylated to form 5-methylcytosine"
agtcaaatctaatttgaaagttgaaggtctaaaacagataaatgcaagagctactgtgatcgaagcagacaaattgaggagagcaaaatcatttaatcaaagaggaagacgtgacccagctc

SEQ ID NO: 25816 - DNA, 122 bp, Homo sapiens
  misc_feature (61)..(62): /note="This region represents a CpG dinucleotide"
  misc_feature (61)..(61): /note="Nucleotide may be methylated to form 5-methylcytosine"
aacacagatttactgttttgctacatatccagataggaatttacttaaggcttagtttgtcgcttatttggatcgtggtgatgtagggtgattactctagcaaaaagcaagaaggctggtac

SEQ ID NO: 25817 - DNA, 122 bp, Homo sapiens
  misc_feature (61)..(62): /note="This region represents a CpG dinucleotide"
  misc_feature (61)..(61): /note="Nucleotide may be methylated to form 5-methylcytosine"
ttttgaaaatacctcaaacaacatatataaatcagaccaaggatattaatctcaggccaccgccatagtgaggctttgaagccaggggaaggtggtgagaccttcttgtttgttaaggaaga

SEQ ID NO: 25818 - DNA, 122 bp, Homo sapiens
  misc_feature (61)..(62): /note="This region represents a CpG dinucleotide"
  misc_feature (61)..(61): /note="Nucleotide may be methylated to form 5-methylcytosine"
cttccttcatcaaaagattccactcctgaatcactagcggcagcactgattttttcctgtcgtcttctcataatttcttgtaactcggagctgccactgctatcctgaaagataaacagttc

SEQ ID NO: 25819 - DNA, 122 bp, Homo sapiens
  misc_feature (61)..(62): /note="This region represents a CpG dinucleotide"
  misc_feature (61)..(61): /note="Nucleotide may be methylated to form 5-methylcytosine"
gcacgggccagccccttattctaatgttagggtttatctcacttgacctcttgtcccttgcgtgcccttctttatgcaaacccaagaggagtaaatcccctgcatgctagggattaattact

SEQ ID NO: 25820 - DNA, 122 bp, Homo sapiens
  misc_feature (61)..(62): /note="This region represents a CpG dinucleotide"
  misc_feature (61)..(61): /note="Nucleotide may be methylated to form 5-methylcytosine"
acccgagccacagagatgagtcacacaaacacctccaggctggctgaaagaagccagatacgaaagaatgcgtacatgggactctatttttttttttttttttcgctctgtctcccaggctg

SEQ ID NO: 25821 - DNA, 122 bp, Homo sapiens
  misc_feature (61)..(62): /note="This region represents a CpG dinucleotide"
  misc_feature (61)..(61): /note="Nucleotide may be methylated to form 5-methylcytosine"
ttatcatctaactcctctaaaacaacatgtctgtctctttttctgtacacttacgacaagcgtatcaataagcctagtgcctaagactaaggtaaaacaaataaccattctttgtctcataa

SEQ ID NO: 25822 - DNA, 122 bp, Homo sapiens
  misc_feature (61)..(62): /note="This region represents a CpG dinucleotide"
  misc_feature (61)..(61): /note="Nucleotide may be methylated to form 5-methylcytosine"
caatggcagcaatagctcaggcagccacaaccacagccctcagcccgctgcaagtgagagcgcagagcacctggcctcctacagcccggagctccagcagttccatctgctggccgccagag

SEQ ID NO: 25823 - DNA, 122 bp, Homo sapiens
  misc_feature (61)..(62): /note="This region represents a CpG dinucleotide"
  misc_feature (61)..(61): /note="Nucleotide may be methylated to form 5-methylcytosine"
ggatcagactgaaaggacaggcatgctgatctccagcaggcaggggccaggagaaagtctcgtttgccaacacttgttactgaagcgcagaaaaagcagcaagtgacagtcacaaagtcttc

SEQ ID NO: 25824 - DNA, 122 bp, Homo sapiens
  misc_feature (61)..(62): /note="This region represents a CpG dinucleotide"
  misc_feature (61)..(61): /note="Nucleotide may be methylated to form 5-methylcytosine"
gcacagaggagggaacgcttgtgtctaactgatgctcctaatgcggaagcccctgaaaggcggttgtggtgcaaaggaaaacccacaggccaaggaatgggaagaccaaggttgacacttgt

SEQ ID NO: 25825 - DNA, 122 bp, Homo sapiens
  misc_feature (61)..(62): /note="This region represents a CpG dinucleotide"
  misc_feature (61)..(61): /note="Nucleotide may be methylated to form 5-methylcytosine"
ttcccctttggcccctggatcttctggttttccttctgatcatgtgtataatgactgctgcgtatacatttttgtctccaaaattctataatcatttttctccctccccgagtggcaaacaa

SEQ ID NO: 25826 - DNA, 122 bp, Homo sapiens
  misc_feature (61)..(62): /note="This region represents a CpG dinucleotide"
  misc_feature (61)..(61): /note="Nucleotide may be methylated to form 5-methylcytosine"
atgctgcccccgcgggcgcgctccctgaagtcctttgtggtcacctcagtggtggctttccgtgagtccgagggccaggggtgggcgtgggactggccagccttccatggagtggggctggg

SEQ ID NO: 25827 - DNA, 122 bp, Homo sapiens
  misc_feature (61)..(62): /note="This region represents a CpG dinucleotide"
  misc_feature (61)..(61): /note="Nucleotide may be methylated to form 5-methylcytosine"
agacttcccgtaaggggcagcgggcgcgcctctcctggggctggatcaatgaggaacccacgtcaatacctgtcacaagggcctgtggttagacatgtcacgcacatgctgccatgcttgtg

SEQ ID NO: 25828 - DNA, 122 bp, Homo sapiens
  misc_feature (61)..(62): /note="This region represents a CpG dinucleotide"
  misc_feature (61)..(61): /note="Nucleotide may be methylated to form 5-methylcytosine"
atgggtcagggctgaaactagagctgtgagtcatctatatagaggtgattatcattcacacgtgtgaatgagcacctaaatttgaatttggtggcaaaggactagttttagggaacattcac

SEQ ID NO: 25829 - DNA, 122 bp, Homo sapiens
  misc_feature (61)..(62): /note="This region represents a CpG dinucleotide"
  misc_feature (61)..(61): /note="Nucleotide may be methylated to form 5-methylcytosine"
gcagcacccgcccagtcacgtctgtcatctcatctttgaccatgattccaaattcacggacgtatggatctgtgttgaaacttgcacttcgcatctggcaaagggaaacaagaaaacgcacg

SEQ ID NO: 25830 - DNA, 122 bp, Homo sapiens
  misc_feature (61)..(62): /note="This region represents a CpG dinucleotide"
  misc_feature (61)..(61): /note="Nucleotide may be methylated to form 5-methylcytosine"
caaccacgcccagcctgtatttcacaatctccagtttctttgaggtccacagaccttttgcggaataattcctccctcaacattagctcatagcttctatcttcttttctgcatctaactct

SEQ ID NO: 25831 - DNA, 122 bp, Homo sapiens
  misc_feature (61)..(62): /note="This region represents a CpG dinucleotide"
  misc_feature (61)..(61): /note="Nucleotide may be methylated to form 5-methylcytosine"
gggaactataactttgaatttcctggctctggggctgtgaaaatcacaacctgaaccttccgttgatgtgggtttctcgattaatttcctgtttgattgtttactttagagagcggaaaatg

SEQ ID NO: 25832 - DNA, 122 bp, Homo sapiens
  misc_feature (61)..(62): /note="This region represents a CpG dinucleotide"
  misc_feature (61)..(61): /note="Nucleotide may be methylated to form 5-methylcytosine"
atggtggctgtgaagaggtggctgctctgcttccgcagcttctgggcttgtgcgtagaggcggcgggtactgcggcaggaggcaggcgccagccaacttagctccttctaaattgtcctcat

SEQ ID NO: 25833 - DNA, 122 bp, Homo sapiens
  misc_feature (61)..(62): /note="This region represents a CpG dinucleotide"
  misc_feature (61)..(61): /note="Nucleotide may be methylated to form 5-methylcytosine"
actctttctcatcatcgcacagttctctatttgaaacagcaaatgattcttgggccgtggcgtggtatttgggctcctcctccggggggaggggtggaaggagtgctctgcaggaagtagag

SEQ ID NO: 25834 - DNA, 122 bp, Homo sapiens
  misc_feature (61)..(62): /note="This region represents a CpG dinucleotide"
  misc_feature (61)..(61): /note="Nucleotide may be methylated to form 5-methylcytosine"
cctggctttgcctctcagaggttccggggctctcccagggttggtttacttgtggtgaagcgtgactaataggtaaagtatctgacaaaatgggccccacaggccatggttgctgcttctgg

SEQ ID NO: 25835 - DNA, 122 bp, Homo sapiens
  misc_feature (61)..(62): /note="This region represents a CpG dinucleotide"
  misc_feature (61)..(61): /note="Nucleotide may be methylated to form 5-methylcytosine"
tggatgccattctagtgtcacagagggatttccttttcagagcacttacagtgccttccccgcctgtggttgagctagatttcctttaggaaattttatttgagcccacagggagagagcac

SEQ ID NO: 25836 - DNA, 122 bp, Homo sapiens
  misc_feature (61)..(62): /note="This region represents a CpG dinucleotide"
  misc_feature (61)..(61): /note="Nucleotide may be methylated to form 5-methylcytosine"
tgcccctgggtcctcgagggttatggcttgtccctggtcagtcctgtctgatcgaggcctcgcctctctgcccctccctgcccagttcctacccacctggctaaggccagtgcccattttta

SEQ ID NO: 25837 - DNA, 122 bp, Homo sapiens
  misc_feature (61)..(62): /note="This region represents a CpG dinucleotide"
  misc_feature (61)..(61): /note="Nucleotide may be methylated to form 5-methylcytosine"
caggacgaggaatgctagatgatcagactaatacatttaagctcttccaaaaatgtgctccggaaaagcaatctccgtggagaaacaggttgaagattaaattgcccctccctgggggcacc

SEQ ID NO: 25838 - DNA, 122 bp, Homo sapiens
  misc_feature (61)..(62): /note="This region represents a CpG dinucleotide"
  misc_feature (61)..(61): /note="Nucleotide may be methylated to form 5-methylcytosine"
tgaaaatatgagttagtagtgaggaatgttctgactcgactaggcattctctagcatcaccgcagcttagacagggaggggcagcttgttactgtcaggtgaggataaagccagattatctc

SEQ ID NO: 25839 - DNA, 122 bp, Homo sapiens
  misc_feature (61)..(62): /note="This region represents a CpG dinucleotide"
  misc_feature (61)..(61): /note="Nucleotide may be methylated to form 5-methylcytosine"
tataatactctttcccaacatttttggctgcatactccttaatgcctcttcaaaagataacgatttggtaattttttttacaggaaatggcatggaatgagaagtcagtaaaaccttgtttc

SEQ ID NO: 25840 - DNA, 122 bp, Homo sapiens
  misc_feature (61)..(62): /note="This region represents a CpG dinucleotide"
  misc_feature (61)..(61): /note="Nucleotide may be methylated to form 5-methylcytosine"
ctgcttgaatttctgggcctcagtttcttcatgtgtagaacagagctgtcaaccctactccgtcacagggctggttctatgaaagaactgagcgggccttgggttcccacacccatggggat

SEQ ID NO: 25841 - DNA, 122 bp, Homo sapiens
  misc_feature (61)..(62): /note="This region represents a CpG dinucleotide"
  misc_feature (61)..(61): /note="Nucleotide may be methylated to form 5-methylcytosine"
ggacagaaaccttatatcccaggcaaagccttagcaatgctgctgatgtcatatgctcatcgttgtcaagaattgaaaattaagatagtgatgaggtggtggcaggacaaatttcttctttt

SEQ ID NO: 25842 - DNA, 122 bp, Homo sapiens
  misc_feature (61)..(62): /note="This region represents a CpG dinucleotide"
  misc_feature (61)..(61): /note="Nucleotide may be methylated to form 5-methylcytosine"
ttaagccattcccttttgaaccaaaagagcagtcaggctctccctagagagagggaggtacggcagctcaaaagagatgccagtctcccagctggagaggaaagcagaggttgctgtccaaa

SEQ ID NO: 25843 - DNA, 122 bp, Homo sapiens
  misc_feature (61)..(62): /note="This region represents a CpG dinucleotide"
  misc_feature (61)..(61): /note="Nucleotide may be methylated to form 5-methylcytosine"
cagatgagcattataacctcctaagctctaccctacatggtttaaaaacctgccctaagacgacaactggaatgtgatctgttcagaaggtggaacagggcagttattcaagaagttatctg

SEQ ID NO: 25844 - DNA, 122 bp, Homo sapiens
  misc_feature (61)..(62): /note="This region represents a CpG dinucleotide"
  misc_feature (61)..(61): /note="Nucleotide may be methylated to form 5-methylcytosine"
attcacaacaacatctcaacctaaagaagaagaactacacaacagtggccagtttcaggacgtaacaaaatgcctgtcattggcactgagatatgaaacagcagaggatgcatgaatcagtg

SEQ ID NO: 25845 - DNA, 122 bp, Homo sapiens
  misc_feature (61)..(62): /note="This region represents a CpG dinucleotide"
  misc_feature (61)..(61): /note="Nucleotide may be methylated to form 5-methylcytosine"
ttcatttctcgttctgacttctgagctgcgaggtgagctctgtggtcagctgcactgtggcgtatgctcgctgtcattcagctgacatttcagctgctcccaaagtcaacatttatgagttc

SEQ ID NO: 25846 - DNA, 122 bp, Homo sapiens
  misc_feature (61)..(62): /note="This region represents a CpG dinucleotide"
  misc_feature (61)..(61): /note="Nucleotide may be methylated to form 5-methylcytosine"
ctagcatagttgaatgtattccctttcctaccaggagttcagaggatcattaaagactcacgctggccatagggtgagtaataagatgctgttttctgggcgtcgccaaaatcatagaccac

SEQ ID NO: 25847 - DNA, 122 bp, Homo sapiens
  misc_feature (61)..(62): /note="This region represents a CpG dinucleotide"
  misc_feature (61)..(61): /note="Nucleotide may be methylated to form 5-methylcytosine"
gagaaaggacatgaggaaggcgagcccaggaaggctaaaagtcccggacgggagagaaggcggatacagggagacaaacacccacacccactgcacagacccggcggcacacacaccctcac

SEQ ID NO: 25848 - DNA, 122 bp, Homo sapiens
  misc_feature (61)..(62): /note="This region represents a CpG dinucleotide"
  misc_feature (61)..(61): /note="Nucleotide may be methylated to form 5-methylcytosine"
gatgttctccaaaggtgcaaaatgaggttgttgagaaaggtggtgtgtggctggttgatgcgaggctttgagtccgcctgcctgtgaagtttgattttgaaatctcagcctcttagaagcct

SEQ ID NO: 25849 - DNA, 122 bp, Homo sapiens
  misc_feature (61)..(62): /note="This region represents a CpG dinucleotide"
  misc_feature (61)..(61): /note="Nucleotide may be methylated to form 5-methylcytosine"
tgattgtgacagaacactcacagccatatacccaagggccaaatggcaagattaaaagttcgtgtcactaatgccaacagacacacagtcatacaaagactaacatgttcacacatagacac

SEQ ID NO: 25850 - DNA, 122 bp, Homo sapiens
  misc_feature (61)..(62): /note="This region represents a CpG dinucleotide"
  misc_feature (61)..(61): /note="Nucleotide may be methylated to form 5-methylcytosine"
tggtttctctgttacatcactcagcattttctagggcagacactcttctaaaaccagatgcgtaacttcatgtgaaataacggactctcaaacttacaccactatacagtagggtcatacta

SEQ ID NO: 25851 - DNA, 122 bp, Homo sapiens
  misc_feature (61)..(62): /note="This region represents a CpG dinucleotide"
  misc_feature (61)..(61): /note="Nucleotide may be methylated to form 5-methylcytosine"
gataatacttaccttgtactgtaaggattaaatgatataatacacatcatgtgtttagaacggtgcctggcacctaggctattattatttgctatccccgactgtctgtctcccttttcttt

SEQ ID NO: 25852 - DNA, 122 bp, Homo sapiens
  misc_feature (61)..(62): /note="This region represents a CpG dinucleotide"
  misc_feature (61)..(61): /note="Nucleotide may be methylated to form 5-methylcytosine"
cctagacattttatctttcccagctcaagatggataaactcagaatgacaggccaggcaccgtggctcatgcctgtaatcccagcactttgggaggcggaggcgggtggatcacttgagacc

SEQ ID NO: 25853 - DNA, 122 bp, Homo sapiens
  misc_feature (61)..(62): /note="This region represents a CpG dinucleotide"
  misc_feature (61)..(61): /note="Nucleotide may be methylated to form 5-methylcytosine"
gaggccaagcttgtttgctttgtggtcatctgttctcagccaagagaggcctaagcagggcgtggggagcagctgcaagtcaccttgggtgactgatgttatctaggcctaacggtttcctc

SEQ ID NO: 25854 - DNA, 122 bp, Homo sapiens
  misc_feature (61)..(62): /note="This region represents a CpG dinucleotide"
  misc_feature (61)..(61): /note="Nucleotide may be methylated to form 5-methylcytosine"
tgtgggctgagacctcttccctttttcatcatttgggcttccggggcatagaatgggatgcgtcattggcctggggtctgtgctgctgttgggcgtctgtgcatagtcctcttttgtctatt

SEQ ID NO: 25855 - DNA, 122 bp, Homo sapiens
  misc_feature (61)..(62): /note="This region represents a CpG dinucleotide"
  misc_feature (61)..(61): /note="Nucleotide may be methylated to form 5-methylcytosine"
caggtggaatccaccttatactaagtatttctcggtacctcgagtcattatgcttcagaccgtgtcttcctgtctagcgcactcatcagtccacatgttggttttgtcacagttgctgacac

SEQ ID NO: 25856 - DNA, 122 bp, Homo sapiens
  misc_feature (61)..(62): /note="This region represents a CpG dinucleotide"
  misc_feature (61)..(61): /note="Nucleotide may be methylated to form 5-methylcytosine"
tagaggatactttccaattcaacttctccacagtgagaccagcgatgataaggtcattttcgtagtaaattagtgactgggctaggactgtaacatgaatttccagatccttaatccatttt

SEQ ID NO: 25857 - DNA, 122 bp, Homo sapiens
  misc_feature (61)..(62): /note="This region represents a CpG dinucleotide"
  misc_feature (61)..(61): /note="Nucleotide may be methylated to form 5-methylcytosine"
gatgctgactagctgggtcttcttggattagtcacccaacttctaagctcattttgcaatcgataaggtgggacaataatacctacctcaaagggttgtggtgagttctaaatgcaataact

SEQ ID NO: 25858 - DNA, 122 bp, Homo sapiens
  misc_feature (61)..(62): /note="This region represents a CpG dinucleotide"
  misc_feature (61)..(61): /note="Nucleotide may be methylated to form 5-methylcytosine"
cacagctgcattttctattccaacccccatattccctcgagttatgactttgtagccacacgacactttggtttaacggaagcagattgatcaagagatgagattataagaggaggaagaga

SEQ ID NO: 25859 - DNA, 122 bp, Homo sapiens
  misc_feature (61)..(62): /note="This region represents a CpG dinucleotide"
  misc_feature (61)..(61): /note="Nucleotide may be methylated to form 5-methylcytosine"
tgtattagtttattacagtgtttcaaaagtatcattttatttcacacattttcactggaacgtaatatgaacttagtggttagagtcaagctattagagtatgtctggtggtttccctttat

SEQ ID NO: 25860 - DNA, 122 bp, Homo sapiens
  misc_feature (61)..(62): /note="This region represents a CpG dinucleotide"
  misc_feature (61)..(61): /note="Nucleotide may be methylated to form 5-methylcytosine"
cctctgagcaaaaataaccctggaggaagttggtgggtataaatcgtcaatgaataaatacgcatcgctagtaaataggggatggagccccacagggccactcaccccccagggccttgtgg

SEQ ID NO: 25861 - DNA, 122 bp, Homo sapiens
  misc_feature (61)..(62): /note="This region represents a CpG dinucleotide"
  misc_feature (61)..(61): /note="Nucleotide may be methylated to form 5-methylcytosine"
taaagtgcactgtcttaaaatgtacagcttgatccttctttaaaaaaaatcatatacgtacgcccatgtaactactgttcatatctagatgttgaacacctccaacacatccaacataacca

SEQ ID NO: 25862 - DNA, 122 bp, Homo sapiens
  misc_feature (61)..(62): /note="This region represents a CpG dinucleotide"
  misc_feature (61)..(61): /note="Nucleotide may be methylated to form 5-methylcytosine"
gatcaggtgaggatttcatctttcacctttcacaacacttgatcataaaacaaagctgagcgtttaacagtttaggtttcaggcctcttcaaaatgtccctgggtcaaatggctgcagggaa

SEQ ID NO: 25863 - DNA, 122 bp, Homo sapiens
  misc_feature (61)..(62): /note="This region represents a CpG dinucleotide"
  misc_feature (61)..(61): /note="Nucleotide may be methylated to form 5-methylcytosine"
aaggaaagtgctgagttgcctacaggatatccgggtgaaaacatccagcagttatttatccgcctgggacagtactgacctttaagacttactgtatctcctgaatagcctatttggacttc

SEQ ID NO: 25864 - DNA, 122 bp, Homo sapiens
  misc_feature (61)..(62): /note="This region represents a CpG dinucleotide"
  misc_feature (61)..(61): /note="Nucleotide may be methylated to form 5-methylcytosine"
attcaacttacccaaaggtaatctccatcaacttttatggcaaacttcagttttctcagacgaacaagagtaggaggagagtcagaaatgtcagaaacacagcggacaactccagcaatctg

SEQ ID NO: 25865 - DNA, 122 bp, Homo sapiens
  misc_feature (61)..(62): /note="This region represents a CpG dinucleotide"
  misc_feature (61)..(61): /note="Nucleotide may be methylated to form 5-methylcytosine"
ggatgaagagaaggattacaaagattatttccttccctcaagcataacaaactggtgggacgcattaaggttggatcaaggaaattaggaaatgtttttctgggccctgaaggaggaaatga

SEQ ID NO: 25866 - DNA, 122 bp, Homo sapiens
  misc_feature (61)..(62): /note="This region represents a CpG dinucleotide"
  misc_feature (61)..(61): /note="Nucleotide may be methylated to form 5-methylcytosine"
gccagcacgcagatgacactcatgtaacagcagccatccaggtgagaatgccacttaccacgtgagatcttgctggttatcctgggtgctgccaccactggttttagtcatacagacagttt

SEQ ID NO: 25867 - DNA, 122 bp, Homo sapiens
  misc_feature (61)..(62): /note="This region represents a CpG dinucleotide"
  misc_feature (61)..(61): /note="Nucleotide may be methylated to form 5-methylcytosine"
ccactcaactcctcctctatggatatgttcggacatgtgtaatttatcccagggccctttcggactggagttaatctcacatcctagtctacacgcatcacctgccacccaactcgtccccc

SEQ ID NO: 25868 - DNA, 122 bp, Homo sapiens
  misc_feature (61)..(62): /note="This region represents a CpG dinucleotide"
  misc_feature (61)..(61): /note="Nucleotide may be methylated to form 5-methylcytosine"
cgctcagtcagcagaatgtgagcatggacttggccacgttcatgaagctgcggacggatgcggtgctggtatggcgagcgggaggaggggcgtgtggaggaggggcccgtggaggaggggcg

SEQ ID NO: 25869 - DNA, 122 bp, Homo sapiens
  misc_feature (61)..(62): /note="This region represents a CpG dinucleotide"
  misc_feature (61)..(61): /note="Nucleotide may be methylated to form 5-methylcytosine"
actccagtggcacattatcagagctgactatttctggaagccaggagataacaaacaaagcggtttcatttggcctataagcatgttaaacaccctcggcagaggacagcagaatacaaata

SEQ ID NO: 25870 - DNA, 122 bp, Homo sapiens
  misc_feature (61)..(62): /note="This region represents a CpG dinucleotide"
  misc_feature (61)..(61): /note="Nucleotide may be methylated to form 5-methylcytosine"
agtctctgcctgcatagcctattatttctcacaagcaatccatgaagaaggttaagacaacggactttcacgccagactgcctgggttcttatcaagtatgtgacttagtttatatatttgt

SEQ ID NO: 25871 - DNA, 122 bp, Homo sapiens
  misc_feature (61)..(62): /note="This region represents a CpG dinucleotide"
  misc_feature (61)..(61): /note="Nucleotide may be methylated to form 5-methylcytosine"
aatggggaggggggagcctcccagggcatccaggctgcctaaccaaggatgaaagtccaacgccaggcagtaattcagtcttgttattcttgttgagcaggccatgacatgtgctctggatt

SEQ ID NO: 25872 - DNA, 122 bp, Homo sapiens
  misc_feature (61)..(62): /note="This region represents a CpG dinucleotide"
  misc_feature (61)..(61): /note="Nucleotide may be methylated to form 5-methylcytosine"
agcatgaggcgtggctgctgcaaagcagacatgtccatttctgtccagacacagttggggcgggcagtgggtggctgcagcctgtccttacatggggctaaaggggcccagccacttagtga

SEQ ID NO: 25873 - DNA, 122 bp, Homo sapiens
  misc_feature (61)..(62): /note="This region represents a CpG dinucleotide"
  misc_feature (61)..(61): /note="Nucleotide may be methylated to form 5-methylcytosine"
cacagggttgctgtgagggtcagtgacacataaggacatcacccagcacagagccaggctcgctcgtgtcctctttcctcactcctttttttggagaaggcagtgtctgggcaggcccagct

SEQ ID NO: 25874 - DNA, 122 bp, Homo sapiens
  misc_feature (61)..(62): /note="This region represents a CpG dinucleotide"
  misc_feature (61)..(61): /note="Nucleotide may be methylated to form 5-methylcytosine"
ccttgtgatgcagctatcccataaccacaaaggcttaatgtgattaaagccacaataaatcgcagacgctcttcatgaggccaagagagctgacccatgtcacgttgccaaaaagcagtttt

SEQ ID NO: 25875 - DNA, 122 bp, Homo sapiens
  misc_feature (61)..(62): /note="This region represents a CpG dinucleotide"
  misc_feature (61)..(61): /note="Nucleotide may be methylated to form 5-methylcytosine"
acagttgagcaagggtaatggaaactgcggaaagtgaaaccaagataagagggggactaccgtatagggaagttagtcacttatgtacatctcacacagtaagctaatgtcagggacaacag

SEQ ID NO: 25876 - DNA, 122 bp, Homo sapiens
  misc_feature (61)..(62): /note="This region represents a CpG dinucleotide"
  misc_feature (61)..(61): /note="Nucleotide may be methylated to form 5-methylcytosine"
gagggtgtgggcaagcctgtggctcttattcacaggattcactgcctggaacagtctaggcgtggctggattttgggctttggatcgcaaaagaggtagaccctgcccactgccatcctgct

SEQ ID NO: 25877 - DNA, 122 bp, Homo sapiens
  misc_feature (61)..(62): /note="This region represents a CpG dinucleotide"
  misc_feature (61)..(61): /note="Nucleotide may be methylated to form 5-methylcytosine"
tacagaactctctaacttagaggtgatcgtccatacggcagatcattacaacatgaaaaacgtaagctaagatgttgaacacagccagaactgaaaataaaagagctttctaaaacaaatca

SEQ ID NO: 25878 - DNA, 122 bp, Homo sapiens
  misc_feature (61)..(62): /note="This region represents a CpG dinucleotide"
  misc_feature (61)..(61): /note="Nucleotide may be methylated to form 5-methylcytosine"
aagagacagggactgatgataacaaatgaccacgaataataagggaaacaagtacacaagcggtaatgataacagtgaaaaagtgatagggtcaacaaaaatgtctccatgaggttgaagta

SEQ ID NO: 25879 - DNA, 122 bp, Homo sapiens
  misc_feature (61)..(62): /note="This region represents a CpG dinucleotide"
  misc_feature (61)..(61): /note="Nucleotide may be methylated to form 5-methylcytosine"
cgtaagccagagcttccttcatgccaaggaacagtgacatggcttgtcactttcaagttacgtctcttggctgaagggtgatcttttctattcattctggcttcgtgacagcaagtaaaagt

SEQ ID NO: 25880 - DNA, 122 bp, Homo sapiens
  misc_feature (61)..(62): /note="This region represents a CpG dinucleotide"
  misc_feature (61)..(61): /note="Nucleotide may be methylated to form 5-methylcytosine"
ataggaagaagtcatcccgggcttccccagacttcaagtatctttagaatgttgagcttccggcagatttttctctaccaggacctaccacatcctgcatgtgttataaacagaatcagtcc

SEQ ID NO: 25881 - DNA, 122 bp, Homo sapiens
  misc_feature (61)..(62): /note="This region represents a CpG dinucleotide"
  misc_feature (61)..(61): /note="Nucleotide may be methylated to form 5-methylcytosine"
tccctactttcatgaatttatagtccagtgagggaaataagatgaataaaaagacccctacgtctttttgtttgaactctggtaaagaaatgtgtttatcagaggggctaggccaaacttta

SEQ ID NO: 25882 - DNA, 122 bp, Homo sapiens
  misc_feature (61)..(62): /note="This region represents a CpG dinucleotide"
  misc_feature (61)..(61): /note="Nucleotide may be methylated to form 5-methylcytosine"
agtgtgagagtcagagtggttaaaggacttacctaacgtgccatagctagaaagtggtgtcgagctggggccagagatcctgagaatcttatgatcaatccagttcattaggtacccaatag

SEQ ID NO: 25883 - DNA, 122 bp, Homo sapiens
  misc_feature (61)..(62): /note="This region represents a CpG dinucleotide"
  misc_feature (61)..(61): /note="Nucleotide may be methylated to form 5-methylcytosine"
tacagttctcaatgtttgctgttctgcgtcaccctcagagttacagatgactgtgactcacgcctggagaagcagcaaggtggggtgagaaaggccaggtggtgacctttgtccaaccatgg

SEQ ID NO: 25884 - DNA, 122 bp, Homo sapiens
  misc_feature (61)..(62): /note="This region represents a CpG dinucleotide"
  misc_feature (61)..(61): /note="Nucleotide may be methylated to form 5-methylcytosine"
aactataattgttatcaagtacaacaaggggacccggctccctccctgggctctcccctccgctaccccccgcaactctgagttatgggcgatcagttaattggaatcggtggcatgacagg

SEQ ID NO: 25885 - DNA, 122 bp, Homo sapiens
  misc_feature (61)..(62): /note="This region represents a CpG dinucleotide"
  misc_feature (61)..(61): /note="Nucleotide may be methylated to form 5-methylcytosine"
ggacctgaaggttgtctttccaggactctttccaggagggccagggaggctctgtatatacgtagaggtcacccaggcgtgtgtgtgtgcgcgcccccacgcccctgcccacaggcctgcat

SEQ ID NO: 25886 - DNA, 122 bp, Homo sapiens
  misc_feature (61)..(62): /note="This region represents a CpG dinucleotide"
  misc_feature (61)..(61): /note="Nucleotide may be methylated to form 5-methylcytosine"
tgcttactgcaatcttgcatatgttagcattggtcttgtgtgactcgtaactagaacgtacgtgaggaaggcaaattctctgggtcagaacacagcatcactggagttcccacttacagcac

SEQ ID NO: 25887 - DNA, 122 bp, Homo sapiens
  misc_feature (61)..(62): /note="This region represents a CpG dinucleotide"
  misc_feature (61)..(61): /note="Nucleotide may be methylated to form 5-methylcytosine"
caagcctctgactctgcctttcctccaccctggccactcccgccgccctggactcacacacgcccaggcttcaatgccagctctgtttctgactagctgagtgacttcaggcaggtgacagc

SEQ ID NO: 25888 - DNA, 122 bp, Homo sapiens
  misc_feature (61)..(62): /note="This region represents a CpG dinucleotide"
  misc_feature (61)..(61): /note="Nucleotide may be methylated to form 5-methylcytosine"
ttttgtagagatggggtctcactgtgttgcgcaggctggtctgaaactgctgagctctaccgatcctcttgcctcagcctcccaaaatgctgggattacaagtgtgagccggctacttcccg

SEQ ID NO: 25889 - DNA, 122 bp, Homo sapiens
  misc_feature (61)..(62): /note="This region represents a CpG dinucleotide"
  misc_feature (61)..(61): /note="Nucleotide may be methylated to form 5-methylcytosine"
cgccccggcctctcaaagtgctgggattacaggcgtgagccaccacgcccagcctgcttacggtcacttgtaaatcagatgactttctgcttggtattttgctgtcttcttcaaagtttgga

SEQ ID NO: 25890 - DNA, 122 bp, Homo sapiens
  misc_feature (61)..(62): /note="This region represents a CpG dinucleotide"
  misc_feature (61)..(61): /note="Nucleotide may be methylated to form 5-methylcytosine"
cgcagattgccaggaaaccaccagaggttaagaagggggcaaggaagaatctctcagaaacgtaagagagactgtggccctggtgatgccttgatttcagacttctagcctccagaactgtg

SEQ ID NO: 25891 - DNA, 122 bp, Homo sapiens
  misc_feature (61)..(62): /note="This region represents a CpG dinucleotide"
  misc_feature (61)..(61): /note="Nucleotide may be methylated to form 5-methylcytosine"
tgggttagttgagattctgttgggttattttattatgaagtctgtttgtttttttaattacgagagagtgctctttatagaaaatgtgtaacattgagaaaggtagaaaagatgaatcaggc

SEQ ID NO: 25892 - DNA, 122 bp, Homo sapiens
  misc_feature (61)..(62): /note="This region represents a CpG dinucleotide"
  misc_feature (61)..(61): /note="Nucleotide may be methylated to form 5-methylcytosine"
ccagcacagtagcagttcaggaaatgaggatgataatgagactccatgactgctgagaatcggaagaggaggtatgaattctcattcaaccctaacaattgtccattgtccatgaggccttg

SEQ ID NO: 25893 - DNA, 122 bp, Homo sapiens
  misc_feature (61)..(62): /note="This region represents a CpG dinucleotide"
  misc_feature (61)..(61): /note="Nucleotide may be methylated to form 5-methylcytosine"
ccacccggtttgtggaactttgttacagcagcctaggaaactaacacaggtagttccccccgtcagtcctgccctgctgtaatgattcatgactggcccaacaggaagacctcaaaacattt

SEQ ID NO: 25894 - DNA, 122 bp, Homo sapiens
  misc_feature (61)..(62): /note="This region represents a CpG dinucleotide"
  misc_feature (61)..(61): /note="Nucleotide may be methylated to form 5-methylcytosine"
cactgcccaggagccagaccaggaatgcaaggtgacgcctcgtaagtgtcattgtgaaagcggagccagctccgtgccaatcccctgcctatttcccgttcttgcctgaagaatcccctccc

SEQ ID NO: 25895 - DNA, 122 bp, Homo sapiens
  misc_feature (61)..(62): /note="This region represents a CpG dinucleotide"
  misc_feature (61)..(61): /note="Nucleotide may be methylated to form 5-methylcytosine"
gccgaggaggtttgggttttctcaggtacagacgctatgcaccgcgtcccctgaggagcccgggcagtggcgagccgtccggcccctccgctgcgtgtgtggggattaatgtcccggcgtgg

SEQ ID NO: 25896 - DNA, 122 bp, Homo sapiens
  misc_feature (61)..(62): /note="This region represents a CpG dinucleotide"
  misc_feature (61)..(61): /note="Nucleotide may be methylated to form 5-methylcytosine"
tagagcctctcgtttcctcatttgtaatatgtgatcagaaatctgtcattctcggcctgccgcggtggctcactgctataatcccagcattttgggaggccaaggcaggcagatcacttgag

SEQ ID NO: 25897 - DNA, 122 bp, Homo sapiens
  misc_feature (61)..(62): /note="This region represents a CpG dinucleotide"
  misc_feature (61)..(61): /note="Nucleotide may be methylated to form 5-methylcytosine"
gaagagcactggagtaaaaaccccagtacaaaccttactggggacagtgggcaaccttgtcgggttagtaaaaacaaatggtgtgggccctggaaaatgagggctggaggctgtgaataaag

SEQ ID NO: 25898 - DNA, 122 bp, Homo sapiens
  misc_feature (61)..(62): /note="This region represents a CpG dinucleotide"
  misc_feature (61)..(61): /note="Nucleotide may be methylated to form 5-methylcytosine"
tttcaggtattttaacctccagattttaccagaaacccacagaatgagttgttatgctttcggtatcccgtgactgaaaataaaacccatcacaacaaaatgaccaaaaactgctatgaatt

SEQ ID NO: 25899 - DNA, 122 bp, Homo sapiens
  misc_feature (61)..(62): /note="This region represents a CpG dinucleotide"
  misc_feature (61)..(61): /note="Nucleotide may be methylated to form 5-methylcytosine"
atattacaaccaaggactttgttaccacgggctctgtgtatgaaggtaattaacagcttccggtgccaataaagggagactttcgaagcttcccctgaggtcacacgtccttgcagatttgt

SEQ ID NO: 25900 - DNA, 122 bp, Homo sapiens
  misc_feature (61)..(62): /note="This region represents a CpG dinucleotide"
  misc_feature (61)..(61): /note="Nucleotide may be methylated to form 5-methylcytosine"
agagctggcaatcgaaaatggtgtggtcagaaagacaatgacatccgcccacttcctcgacgccagctgagctcccaggatgtgcctcaagtcatcctgggccacctggcctcaaccatgcc

SEQ ID NO: 25901 - DNA, 122 bp, Homo sapiens
  misc_feature (61)..(62): /note="This region represents a CpG dinucleotide"
  misc_feature (61)..(61): /note="Nucleotide may be methylated to form 5-methylcytosine"
tgactcattccaccttacaaaataccatatgtgggcatcactagtccaatccaagttgcacggtggcaggatcagtgctctctcttttcagtcacacctctagtgagaggtgagtcctctgc

SEQ ID NO: 25902 - DNA, 122 bp, Homo sapiens
  misc_feature (61)..(62): /note="This region represents a CpG dinucleotide"
  misc_feature (61)..(61): /note="Nucleotide may be methylated to form 5-methylcytosine"
tgtgttgttgagtataccaaaacagaactgccagccattagcccatggcttttctgcctacgtgaaaacagcaggattatagtacaaagggcagagacctaagccaagattatgtgctaaga

SEQ ID NO: 25903 - DNA, 122 bp, Homo sapiens
  misc_feature (61)..(62): /note="This region represents a CpG dinucleotide"
  misc_feature (61)..(61): /note="Nucleotide may be methylated to form 5-methylcytosine"
actagacattgtgatgatcatccctgttctacagatgaggaggcaggagagcagacacatcggtatgcagatacacagctggtcgcagcagggctgagccaggaacccagtcagcctcatga

SEQ ID NO: 25904 - DNA, 122 bp, Homo sapiens
  misc_feature (61)..(62): /note="This region represents a CpG dinucleotide"
  misc_feature (61)..(61): /note="Nucleotide may be methylated to form 5-methylcytosine"
gtgtgtttcgaatccctcaggatcttgctgatggcatacaatttaatggcaggcagtgcacgtcttgcaccacatctttgcctaagtttctggtgcgaaattccaagttttgtaaatctagt

SEQ ID NO: 25905 - DNA, 122 bp, Homo sapiens
  misc_feature (61)..(62): /note="This region represents a CpG dinucleotide"
  misc_feature (61)..(61): /note="Nucleotide may be methylated to form 5-methylcytosine"
gactgctcagacaagcactgcctgagccagtaaagtctagcaagctgtgagctctgcttacgccaggagggtgggactggcaagcctttcctttggcaaaactcagaggcctgactcaactg

SEQ ID NO: 25906 - DNA, 122 bp, Homo sapiens
  misc_feature (61)..(62): /note="This region represents a CpG dinucleotide"
  misc_feature (61)..(61): /note="Nucleotide may be methylated to form 5-methylcytosine"
aatcaacctaaagatccaacaacacaggactaaggaaattacaacatattcataagaagacgacttgctaacaagtaatgctgaagggaaaacccgtgtcttggtaaagagatctagctagt

SEQ ID NO: 25907 - DNA, 122 bp, Homo sapiens
  misc_feature (61)..(62): /note="This region represents a CpG dinucleotide"
  misc_feature (61)..(61): /note="Nucleotide may be methylated to form 5-methylcytosine"
gtctggaaagttctatcaggtgcttgttcctctcccttgattttccagcactcaggttcacgagtggtttccaagccaggctgggtgtgcctttgtagatatcaccataaactcaccgatgt

SEQ ID NO: 25908 - DNA, 122 bp, Homo sapiens
  misc_feature (61)..(62): /note="This region represents a CpG dinucleotide"
  misc_feature (61)..(61): /note="Nucleotide may be methylated to form 5-methylcytosine"
aaccaccccgctccccacgcacggagcctcgcagtggctcgagctgagaatcaaagcggccgatccagggcctggtgactccaccagacaggaaatacagaggcttctagcaatctgctctg

SEQ ID NO: 25909 - DNA, 122 bp, Homo sapiens
  misc_feature (61)..(62): /note="This region represents a CpG dinucleotide"
  misc_feature (61)..(61): /note="Nucleotide may be methylated to form 5-methylcytosine"
gcgaggaagggtggcaggaacaaaggagaagggaagaaatactagcataatagtaaaaaacggttaatcattattgagcatttggtatgtgtcaggtgctgtgctgaatccctcacatgaat

SEQ ID NO: 25910 - DNA, 122 bp, Homo sapiens
  misc_feature (61)..(62): /note="This region represents a CpG dinucleotide"
  misc_feature (61)..(61): /note="Nucleotide may be methylated to form 5-methylcytosine"
catgattgttctgagtcagaataagtctaagtcaagcatggtgcctcacctccttgccaacgattggttcccatggtcatgtgatccaatcctgattagtggctgctagaggaattctgcta

SEQ ID NO: 25911 - DNA, 122 bp, Homo sapiens
  misc_feature (61)..(62): /note="This region represents a CpG dinucleotide"
  misc_feature (61)..(61): /note="Nucleotide may be methylated to form 5-methylcytosine"
cctcagttgctttgtatacatattacagataccagaataagtgaagaccttgtgtcagaacgctgtaatacatttcgaatggccaagaggaaattctgcagttgagcactgtgcctctgagg

SEQ ID NO: 25912 - DNA, 122 bp, Homo sapiens
  misc_feature (61)..(62): /note="This region represents a CpG dinucleotide"
  misc_feature (61)..(61): /note="Nucleotide may be methylated to form 5-methylcytosine"
tctgtgcagggcaccagtcttggtaagcaaggtgcaggctggatttgcgtccctgctcaccgccttggtccagggcccttgtgcagtgaacaacctgtccaaccacacaggcagctctgact

SEQ ID NO: 25913 - DNA, 122 bp, Homo sapiens
  misc_feature (61)..(62): /note="This region represents a CpG dinucleotide"
  misc_feature (61)..(61): /note="Nucleotide may be methylated to form 5-methylcytosine"
ggctttccatgttagcctcaccttgccgcacacaccctctcctgctgtgctctaccacaccgtcttaaggggtgaagagaggcaattgactcaatcttgtatgtatacactcttgcaaaacc

SEQ ID NO: 25914 - DNA, 122 bp, Homo sapiens
  misc_feature (61)..(62): /note="This region represents a CpG dinucleotide"
  misc_feature (61)..(61): /note="Nucleotide may be methylated to form 5-methylcytosine"
attggttagcagtctctccctctctgttgtgagtttgtacagctcagttagaatgtctttcgtgggagtctgcttgaaaaatatgtcgcctggatgttcgtccggctcctggctgaggctga

SEQ ID NO: 25915 - DNA, 122 bp, Homo sapiens
  misc_feature (61)..(62): /note="This region represents a CpG dinucleotide"
  misc_feature (61)..(61): /note="Nucleotide may be methylated to form 5-methylcytosine"
tctgatttgggttgtgatatctacacagaccgtgtaaacacagaccgtgtaaacacagaccgtgagatttgctttctttgtttggagaaaagatttcctgagttccttgtcccaggctaatt

SEQ ID NO: 25916 - DNA, 122 bp, Homo sapiens
  misc_feature (61)..(62): /note="This region represents a CpG dinucleotide"
  misc_feature (61)..(61): /note="Nucleotide may be methylated to form 5-methylcytosine"
aagcaccactagccctgggtggtggttcctcttgggtcttcagctgcacctcaggttgcacgtgtgtgggatgcaggcccaacttcagacaggcgattctggcagtcacataggactctctc

SEQ ID NO: 25917 - DNA, 122 bp, Homo sapiens
  misc_feature (61)..(62): /note="This region represents a CpG dinucleotide"
  misc_feature (61)..(61): /note="Nucleotide may be methylated to form 5-methylcytosine"
tagctcaatatatcctctggggaccatcaacatttcctattaaagataactacacctggccgagcgcggtggctaacgcctgtaatcccagaactttgggaagccaaggcgggtggatcaca

SEQ ID NO: 25918 - DNA, 122 bp, Homo sapiens
  misc_feature (61)..(62): /note="This region represents a CpG dinucleotide"
  misc_feature (61)..(61): /note="Nucleotide may be methylated to form 5-methylcytosine"
aggaggaagctgagtagttctgctttctgttaatattgcagcaagagcccatgagtgggccgatcacttcctgattcttgttcttgttctaatcataccttaaaaggcttttttaatgtcca

SEQ ID NO: 25919 - DNA, 122 bp, Homo sapiens
  misc_feature (61)..(62): /note="This region represents a CpG dinucleotide"
  misc_feature (61)..(61): /note="Nucleotide may be methylated to form 5-methylcytosine"
ttttggagcaaattttaactgaacacattgtcagagggtcaggccaagtttggcactgctcgtgtatctcagccaccttccagttttcagcacgatgtctgaactgaaaaaacaccattgct

SEQ ID NO: 25920 - DNA, 122 bp, Homo sapiens
  misc_feature (61)..(62): /note="This region represents a CpG dinucleotide"
  misc_feature (61)..(61): /note="Nucleotide may be methylated to form 5-methylcytosine"
gtcaacactattgtaagggagctacagtttgaaagacacgattactaagcaaaggagagacgctgcaagactcaggtgaacagaactggctaaaggcctaccaatgaaaacaaatgcatatg

SEQ ID NO: 25921 - DNA, 122 bp, Homo sapiens
  misc_feature (61)..(62): /note="This region represents a CpG dinucleotide"
  misc_feature (61)..(61): /note="Nucleotide may be methylated to form 5-methylcytosine"
cccaggtgatccgactgcctcaccctcccaaagtgctgggattagaggcatgagccactgcgcctggcctggtgactaagtagttttctaagagattaataaagccttgggaaattggaatg

SEQ ID NO: 25922 - DNA, 122 bp, Homo sapiens
  misc_feature (61)..(62): /note="This region represents a CpG dinucleotide"
  misc_feature (61)..(61): /note="Nucleotide may be methylated to form 5-methylcytosine"
gcttagattgcctctgtaggaagggcaacttgggaccaacaggcaccatgaaaaagccaacgaggtggactgtgacctcaaaaggcaacactctgcttgtaaaatgacaaattttgctttgg

SEQ ID NO: 25923 - DNA, 122 bp, Homo sapiens
  misc_feature (61)..(62): /note="This region represents a CpG dinucleotide"
  misc_feature (61)..(61): /note="Nucleotide may be methylated to form 5-methylcytosine"
gagcctaataataaattagaatgtgcccaatataaaaaccgctttgagtaggagaggttacggcaagggcaaaaaatgtgaagcaacttgtacaaaaatgctgcaaatagatgagaacagaa

SEQ ID NO: 25924 - DNA, 122 bp, Homo sapiens
  misc_feature (61)..(62): /note="This region represents a CpG dinucleotide"
  misc_feature (61)..(61): /note="Nucleotide may be methylated to form 5-methylcytosine"
caggaacacatttggatattgacacaacttcatctgcagttggcttgtcatcctgagctccgttcccaggcagcgtagatattgcacaggattttgctgaccagggagttgggttataagtg

SEQ ID NO: 25925 - DNA, 122 bp, Homo sapiens
  misc_feature (61)..(62): /note="This region represents a CpG dinucleotide"
  misc_feature (61)..(61): /note="Nucleotide may be methylated to form 5-methylcytosine"
ataggccccactgtgcatcagacattgttctggtgcttcctgtgactcacactgtagcttcggggaagtctttgttttctactactttctactacctgaggctgctaatcttcaagtggaag

SEQ ID NO: 25926 - DNA, 122 bp, Homo sapiens
  misc_feature (61)..(62): /note="This region represents a CpG dinucleotide"
  misc_feature (61)..(61): /note="Nucleotide may be methylated to form 5-methylcytosine"
gggggcggctgggtttcgtccgaagctgggatcggggtggttcaaatacagaggtggggtcgctctggtgctagagtcggagcatccgggtattgggggttagaagtcagggttcaccacgc

SEQ ID NO: 25927 - DNA, 122 bp, Homo sapiens
  misc_feature (61)..(62): /note="This region represents a CpG dinucleotide"
  misc_feature (61)..(61): /note="Nucleotide may be methylated to form 5-methylcytosine"
caatacctgacccaaaccaggtcagattctctaatcctggactttagaattgtgatctgacggcaggtaaggccagctctaagagtagctcagtctttagcacttaaatttgagaactagtg

SEQ ID NO: 25928 - DNA, 122 bp, Homo sapiens
  misc_feature (61)..(62): /note="This region represents a CpG dinucleotide"
  misc_feature (61)..(61): /note="Nucleotide may be methylated to form 5-methylcytosine"
ccgggctcaagtgatcctctcacctcagcctccccaaaatgctaggattacagaggtgagcgactgtgcctggctgatgccttgctgtataaactgcagcctgctggctctccctctccaac

SEQ ID NO: 25929 - DNA, 122 bp, Homo sapiens
  misc_feature (61)..(62): /note="This region represents a CpG dinucleotide"
  misc_feature (61)..(61): /note="Nucleotide may be methylated to form 5-methylcytosine"
tgtccctgggtttcatctagaggaacaggaggtcccttagatgccctggagttggccccgcgcgaggggtgctgggagttgacaggaaagaggaagtggcagccgagaggccctggtggggc

SEQ ID NO: 25930 - DNA, 122 bp, Homo sapiens
  misc_feature (61)..(62): /note="This region represents a CpG dinucleotide"
  misc_feature (61)..(61): /note="Nucleotide may be methylated to form 5-methylcytosine"
acaactgccatttcctggtttcatcagccaggatcatagggtcaaacgtgacaatctgcacgtacgaaatcactcatggtcacctccctcagcatagcaccacgggcagggtaggcacagag

SEQ ID NO: 25931 - DNA, 122 bp, Homo sapiens
  misc_feature (61)..(62): /note="This region represents a CpG dinucleotide"
  misc_feature (61)..(61): /note="Nucleotide may be methylated to form 5-methylcytosine"
agacaaaatacatgctggtgactcagtgtgaggtgttctctcctccttggggggacgaagcgggagcagagaacactgaagccagaggcactgacttaaaatggagcatctgatccttaaag

SEQ ID NO: 25932 - DNA, 122 bp, Homo sapiens
  misc_feature (61)..(62): /note="This region represents a CpG dinucleotide"
  misc_feature (61)..(61): /note="Nucleotide may be methylated to form 5-methylcytosine"
aacactttgatggatggtagagttaacaggctccttgcctgcagctgcttcagacaagagcgtccccaagccctgggcctgacctggaatgtggggatggaaggggagggggaggaaccaag

SEQ ID NO: 25933 - DNA, 122 bp, Homo sapiens
  misc_feature (61)..(62): /note="This region represents a CpG dinucleotide"
  misc_feature (61)..(61): /note="Nucleotide may be methylated to form 5-methylcytosine"
ggagaaatgccccaaaggagactgacccggcgcggtgctggcgggagcgctcaagggcagcggatttgttgttgttgctgttttcctttgtgggtgtttggtgcttgatttccagaaactct

SEQ ID NO: 25934 - DNA, 122 bp, Homo sapiens
  misc_feature (61)..(62): /note="This region represents a CpG dinucleotide"
  misc_feature (61)..(61): /note="Nucleotide may be methylated to form 5-methylcytosine"
acctgcttgtagggtgctaagagtgttctttctggctgagatgtttgcagcgttggccttcgtctttatagttctcactttatttggaacctctccaggttttctctgtttattaaccctca

SEQ ID NO: 25935 - DNA, 122 bp, Homo sapiens
  misc_feature (61)..(62): /note="This region represents a CpG dinucleotide"
  misc_feature (61)..(61): /note="Nucleotide may be methylated to form 5-methylcytosine"
tctggtggtttgaattttatcagtgggtgttattacgctcccttaaccgacaactgcttgcggaagcttggtagagttttaacaattggcaaccacaggcagcatttcattacttatctaaa

SEQ ID NO: 25936 - DNA, 122 bp, Homo sapiens
  misc_feature (61)..(62): /note="This region represents a CpG dinucleotide"
  misc_feature (61)..(61): /note="Nucleotide may be methylated to form 5-methylcytosine"
aattgaatatgatgtcagcatggaacaatctaatgattcattaagagtcaaccataatgacggtgaagagtcaaaaaccagtgctcaagtatttgaggtatggattcagctgggaacctttt

SEQ ID NO: 25937 - DNA, 122 bp, Homo sapiens
  misc_feature (61)..(62): /note="This region represents a CpG dinucleotide"
  misc_feature (61)..(61): /note="Nucleotide may be methylated to form 5-methylcytosine"
agccaagccatatgttttgaatgctatgaatctgaccaataaatatgtacctatttccagcgttcagtaggctaattaacaaaggccggtggtggtggtgttaactgggataaagagttgat

SEQ ID NO: 25938 - DNA, 122 bp, Homo sapiens
  misc_feature (61)..(62): /note="This region represents a CpG dinucleotide"
  misc_feature (61)..(61): /note="Nucleotide may be methylated to form 5-methylcytosine"
gcggcacggctggggtttgaggctgtgcctgactgtgaagctggctctccttatccgtggcgcttcctccctctccgcacgcagtggaggtgctgctgggactgtccttgagtctagcagat

SEQ ID NO: 25939 - DNA, 122 bp, Homo sapiens
  misc_feature (61)..(62): /note="This region represents a CpG dinucleotide"
  misc_feature (61)..(61): /note="Nucleotide may be methylated to form 5-methylcytosine"
gatccccctcctctgcctcccaaagtgctgggattccaggcatgagccactgcgcctggccgatgtcatatctttaggagcgcttccctgaccactctgtttaaatagcatcccccgccctt

SEQ ID NO: 25940 - DNA, 122 bp, Homo sapiens
  misc_feature (61)..(62): /note="This region represents a CpG dinucleotide"
  misc_feature (61)..(61): /note="Nucleotide may be methylated to form 5-methylcytosine"
ctcctgggctccctgccttagctatggcccggccccctgtcagacaacttcagaatgcagcgctcctgcaaagctctcagaaagaccagtgcctggggaagcagcaggggctttgggggttc

SEQ ID NO: 25941 - DNA, 122 bp, Homo sapiens
  misc_feature (61)..(62): /note="This region represents a CpG dinucleotide"
  misc_feature (61)..(61): /note="Nucleotide may be methylated to form 5-methylcytosine"
gggtcttaactgaaccatatgcagtattacatattattgaacagtcatgagtttccaattcgctataatgttttcctctgtgctcacaagttgtttggtgaagtcaagcaagctagcaaaag

SEQ ID NO: 25942 - DNA, 122 bp, Homo sapiens
  misc_feature (61)..(62): /note="This region represents a CpG dinucleotide"
  misc_feature (61)..(61): /note="Nucleotide may be methylated to form 5-methylcytosine"
gcacatagtagagcttccaaagtgttcgtttatttcgtgatttatagacaaacgtatggccgaatgatgtgaaaagccactgtgtttatttcatacattcacactaaggccactgatcctac

SEQ ID NO: 25943 - DNA, 122 bp, Homo sapiens
  misc_feature (61)..(62): /note="This region represents a CpG dinucleotide"
  misc_feature (61)..(61): /note="Nucleotide may be methylated to form 5-methylcytosine"
ttgcttgtatttgtctcattgctctaattctccagtctcctattgccaccctcctctctccgacttgttagatgtaaacgacggtattcactgaaattagatctccttgctcaatgagtcat

SEQ ID NO: 25944 - DNA, 122 bp, Homo sapiens
  misc_feature (61)..(62): /note="This region represents a CpG dinucleotide"
  misc_feature (61)..(61): /note="Nucleotide may be methylated to form 5-methylcytosine"
agaaaccaagccctgttctgtcaccttctcagagaaatagaaagcatcacatgatggctccgtctgcagcattcggaggtgcagcttcctgtttagtcatagagtttcactctttgtcagct

SEQ ID NO: 25945 - DNA, 122 bp, Homo sapiens
  misc_feature (61)..(62): /note="This region represents a CpG dinucleotide"
  misc_feature (61)..(61): /note="Nucleotide may be methylated to form 5-methylcytosine"
gcagatgcattgaggccaggccatggggcaggaggaagacaacacaaagataataatactcgcattgccccatgtggttctacaaccccaagctggtgccaaagccttcccctcgctgcatc

SEQ ID NO: 25946 - DNA, 122 bp, Homo sapiens
  misc_feature (61)..(62): /note="This region represents a CpG dinucleotide"
  misc_feature (61)..(61): /note="Nucleotide may be methylated to form 5-methylcytosine"
aattcccttagtgaaatcactattctctgccaagaatcaaaggtcatcccagtggagtgccgtcttcgtgttcagcagctacggagtgtctggaacagagtgagaacaaaagtatcctcatt

SEQ ID NO: 25947 - DNA, 122 bp, Homo sapiens
  misc_feature (61)..(62): /note="This region represents a CpG dinucleotide"
  misc_feature (61)..(61): /note="Nucleotide may be methylated to form 5-methylcytosine"
cgatgtgctgctcttctcaggagagtttcaaatggcaacttcagctttctaaaacccctacgttctgaatatacctgtgtttctgcacagcatacgttttgaaacagcctaggaaatatatt

SEQ ID NO: 25948 - DNA, 122 bp, Homo sapiens
  misc_feature (61)..(62): /note="This region represents a CpG dinucleotide"
  misc_feature (61)..(61): /note="Nucleotide may be methylated to form 5-methylcytosine"
agtaacatctctgtcctgcaggtggcaagaaacatgagtcacagatcacattaatgtattcggtgagtgagatatttcaaagttgggatttatttctaagacatagcactttaggattccaa

SEQ ID NO: 25949 - DNA, 122 bp, Homo sapiens
  misc_feature (61)..(62): /note="This region represents a CpG dinucleotide"
  misc_feature (61)..(61): /note="Nucleotide may be methylated to form 5-methylcytosine"
aggactaagggaacagcgtgaaagcaggtctggcatgtggggcccaggctttgatcttcacgccaggcctggaagctcaccatgcctctcaccctgtttacactttcccatcgggactgtac

SEQ ID NO: 25950 - DNA, 122 bp, Homo sapiens
  misc_feature (61)..(62): /note="This region represents a CpG dinucleotide"
  misc_feature (61)..(61): /note="Nucleotide may be methylated to form 5-methylcytosine"
caaaccacttttgagctttccactaattgggcagaggctgcacacaccatcattgcaaatcgataggggttttgaagccctgggtgtttcctgtttctggcacagcatggcaactgtcccag

SEQ ID NO: 25951 - DNA, 122 bp, Homo sapiens
  misc_feature (61)..(62): /note="This region represents a CpG dinucleotide"
  misc_feature (61)..(61): /note="Nucleotide may be methylated to form 5-methylcytosine"
ggtcctgaactgctgacctaaggtgatccgcctgcctgggattacaggtgtgagccaccacgcccagcccagggagcactttaatgcaagttgagaagtactcagcacctcctctgttaccg

SEQ ID NO: 25952 - DNA, 122 bp, Homo sapiens
  misc_feature (61)..(62): /note="This region represents a CpG dinucleotide"
  misc_feature (61)..(61): /note="Nucleotide may be methylated to form 5-methylcytosine"
cctggcccacaaacatcttgatagcatcaagatctggttggtctgggtggtccagggtgccgttcattttctttgagctgtgtgagataaaatgaaacttctattatgtaataatgttgctt

SEQ ID NO: 25953 - DNA, 122 bp, Homo sapiens
  misc_feature (61)..(62): /note="This region represents a CpG dinucleotide"
  misc_feature (61)..(61): /note="Nucleotide may be methylated to form 5-methylcytosine"
aagccactttggtgaaacaaaaagaaaagcatttgtttatttagaacgggcaaaatgatacgtttcagtgggtgttttctttgtactttgatctttttgtactgatatttaagcttctgttt

SEQ ID NO: 25954 - DNA, 122 bp, Homo sapiens
  misc_feature (61)..(62): /note="This region represents a CpG dinucleotide"
  misc_feature (61)..(61): /note="Nucleotide may be methylated to form 5-methylcytosine"
ataggacacttgccgcttatttgctgagtatctactttataatcatgatacttaaagtcacgccttctgaaaagaggaagcagatgtggctgcaagaatttatgtaaactactttctaagag

SEQ ID NO: 25955 - DNA, 122 bp, Homo sapiens
  misc_feature (61)..(62): /note="This region represents a CpG dinucleotide"
  misc_feature (61)..(61): /note="Nucleotide may be methylated to form 5-methylcytosine"
ggacctgagctctttttgtaacgagttgttttttcatgaggcctagtcacaagggcccttcgcgaccaggctcaaggaacgcaaaaaggtcaacttgttcttgcaattgtctgttgtttttc

SEQ ID NO: 25956 - DNA, 122 bp, Homo sapiens
  misc_feature (61)..(62): /note="This region represents a CpG dinucleotide"
  misc_feature (61)..(61): /note="Nucleotide may be methylated to form 5-methylcytosine"
caagatagaaacagaatgcttgcctggggacaaactatggagacatcagcatgtgcctgtcgtgagtgagctgctgatgagtcaggaatgagcacagccccagggtgactccgagaccctgt

SEQ ID NO: 25957 - DNA, 122 bp, Homo sapiens
  misc_feature (61)..(62): /note="This region represents a CpG dinucleotide"
  misc_feature (61)..(61): /note="Nucleotide may be methylated to form 5-methylcytosine"
ctgtagagctaattgaggtatcacatagtacttagtgcaaaaacaaccattaggtaaacacgtccgttacacagaagaggaagtggtgaggaaaatatctgtctttaattctcctatcgttc

SEQ ID NO: 25958 - DNA, 122 bp, Homo sapiens
  misc_feature (61)..(62): /note="This region represents a CpG dinucleotide"
  misc_feature (61)..(61): /note="Nucleotide may be methylated to form 5-methylcytosine"
atcttcacaacaacctttaagaaagactctgttaccatcttcaatttacagatgcagaaacgaagcacaaagatgtcatcaaagtgtctgaaggtcacagggccagtaaggccatgggaaat

SEQ ID NO: 25959 - DNA, 122 bp, Homo sapiens
  misc_feature (61)..(62): /note="This region represents a CpG dinucleotide"
  misc_feature (61)..(61): /note="Nucleotide may be methylated to form 5-methylcytosine"
aatttattaaatccatctttattctctattaagaactgaatgattatccccaaactgccacgtacaaataggcctgccatctgctttagctatgataagccctggtttagatagatccctcg

SEQ ID NO: 25960 - DNA, 122 bp, Homo sapiens
  misc_feature (61)..(62): /note="This region represents a CpG dinucleotide"
  misc_feature (61)..(61): /note="Nucleotide may be methylated to form 5-methylcytosine"
agaattaatttgtcttccacatcaccctcaaccaaccccacaccaaagtgttgactcagccgttctgaagcccggattcccagctgcaaaatccccagttaaatttctagacaaaataactt

SEQ ID NO: 25961 - DNA, 122 bp, Homo sapiens
  misc_feature (61)..(62): /note="This region represents a CpG dinucleotide"
  misc_feature (61)..(61): /note="Nucleotide may be methylated to form 5-methylcytosine"
ataattaaagtgcttatattcaagtgttttatccagtctatgcctgctaactcttgaacacgtaatttacattttagaaccagtataaacttgaactgcatatttggctaatgttttcagct

SEQ ID NO: 25962 - DNA, 122 bp, Homo sapiens
  misc_feature (61)..(62): /note="This region represents a CpG dinucleotide"
  misc_feature (61)..(61): /note="Nucleotide may be methylated to form 5-methylcytosine"
ttttggttctgtttacattcttgtcagaaagcccgctattttaagtcagcgcctctcaaacgtgaatgcgcataaggatcacccagggatcttgccacagcctaagtcctgatttgggagtt

SEQ ID NO: 25963 - DNA, 122 bp, Homo sapiens
  misc_feature (61)..(62): /note="This region represents a CpG dinucleotide"
  misc_feature (61)..(61): /note="Nucleotide may be methylated to form 5-methylcytosine"
gcagcgcggcgaggctgtggttctctgcttgtgcccactttgtgtttgtaaatagcgagtcggagtcggagctggagctagtttttcatcatctgtcggcttctgcagaccaatgtcatcat

SEQ ID NO: 25964 - DNA, 122 bp, Homo sapiens
  misc_feature (61)..(62): /note="This region represents a CpG dinucleotide"
  misc_feature (61)..(61): /note="Nucleotide may be methylated to form 5-methylcytosine"
aaatatcagctattatgatttgcaaatgaggaaacagacttagtgactcacccaaggtcacgcccaagtgaatgtggttcctgaccaccacatcccactgcctgtctgggaggcttggtgat

SEQ ID NO: 25965 - DNA, 122 bp, Homo sapiens
  misc_feature (61)..(62): /note="This region represents a CpG dinucleotide"
  misc_feature (61)..(61): /note="Nucleotide may be methylated to form 5-methylcytosine"
tgtgcaggcaccgggagctggggcagcggggcgggaaggagtgtggccggaaggcctccccgcaccttccccagcaggcctggatggcagatctgggaggtgctgatttggctgggggtgca

SEQ ID NO: 25966 - DNA, 122 bp, Homo sapiens
  misc_feature (61)..(62): /note="This region represents a CpG dinucleotide"
  misc_feature (61)..(61): /note="Nucleotide may be methylated to form 5-methylcytosine"
tacactaaatttggaaaccaagtacaggaggaagacaggaaaacagtgaggagcagagtgcgggagaggctaccagctacaagaccagttggaaggctattgctgtagtccaggggagaggt

SEQ ID NO: 25967 - DNA, 122 bp, Homo sapiens
  misc_feature (61)..(62): /note="This region represents a CpG dinucleotide"
  misc_feature (61)..(61): /note="Nucleotide may be methylated to form 5-methylcytosine"
gcagaagaagcacgcagaggagccctgggtccacctgcattactatggcctgagggtgagcggggcttcgtggggtcctgggggaaacacctcggtgcccggaagggtcatggtgtggcctc

SEQ ID NO: 25968 - DNA, 122 bp, Homo sapiens
  misc_feature (61)..(62): /note="This region represents a CpG dinucleotide"
  misc_feature (61)..(61): /note="Nucleotide may be methylated to form 5-methylcytosine"
aaacagccttagaatgctttttttgctgtgggatttcccctaaagggcttggtttctaggcgttagagggtggaaaaaccaactgggtttccgagcccctacctctcctggaagcagtgggc

SEQ ID NO: 25969 - DNA, 122 bp, Homo sapiens
  misc_feature (61)..(62): /note="This region represents a CpG dinucleotide"
  misc_feature (61)..(61): /note="Nucleotide may be methylated to form 5-methylcytosine"
gagacctctccatacagagctccacctcccatccccaccccgtgggcagccagaatcctgcggtctaaacaagcagatgtcagatggcctgagcagcagtatctccagtgtttgtttttgtt

SEQ ID NO: 25970 - DNA, 122 bp, Homo sapiens
  misc_feature (61)..(62): /note="This region represents a CpG dinucleotide"
  misc_feature (61)..(61): /note="Nucleotide may be methylated to form 5-methylcytosine"
gatcaaagcatgacctaagtgataccaaattacaaaatcatgccatcaaactgcagcagccgccttctgacatctctggaatttagattctgaccttgagggtcttaggtggccatttatgg

SEQ ID NO: 25971 - DNA, 122 bp, Homo sapiens
  misc_feature (61)..(62): /note="This region represents a CpG dinucleotide"
  misc_feature (61)..(61): /note="Nucleotide may be methylated to form 5-methylcytosine"
gccctgagctattaaaccttggcgttcttgtgaaatgtgccattctgttcactaacaccacgacatgtggtaggccagggttttcaaagcatgtcacttctccctgtgacatgtgtagactt

SEQ ID NO: 25972 - DNA, 122 bp, Homo sapiens
  misc_feature (61)..(62): /note="This region represents a CpG dinucleotide"
  misc_feature (61)..(61): /note="Nucleotide may be methylated to form 5-methylcytosine"
ctcttcaccagatcccagaggctgaacacctcgaccttctctgcacagcaggtgagtctccgcattaggaacaccttaatattctccaatagtttctttattttgattgagatctctttgct

SEQ ID NO: 25973 - DNA, 122 bp, Homo sapiens
  misc_feature (61)..(62): /note="This region represents a CpG dinucleotide"
  misc_feature (61)..(61): /note="Nucleotide may be methylated to form 5-methylcytosine"
cacaactctatttttagatgtcaaagtgcactcaagtcaaactaccagtcaagatcttgccgatctgaacattcagtgcctctctttttaaaaagaagttgcccctgtaacagcacactgga

SEQ ID NO: 25974 - DNA, 122 bp, Homo sapiens
  misc_feature (61)..(62): /note="This region represents a CpG dinucleotide"
  misc_feature (61)..(61): /note="Nucleotide may be methylated to form 5-methylcytosine"
cttgattggacactggcagtgcttcaacagctgagtgttcaacacttcacatgacctagacgctaagataaatgagccttcacctgatccttttctccctctgtatttattgtaagaggaaa

SEQ ID NO: 25975 - DNA, 122 bp, Homo sapiens
  misc_feature (61)..(62): /note="This region represents a CpG dinucleotide"
  misc_feature (61)..(61): /note="Nucleotide may be methylated to form 5-methylcytosine"
gcctgcagtgcttctatcggtcctgaaagagacagaggaggtaagggagaagaattggtacgaaatggtgcagagctggtctcagagggcaacaacagccagccctccatgaccacactccc

SEQ ID NO: 25976 - DNA, 122 bp, Homo sapiens
  misc_feature (61)..(62): /note="This region represents a CpG dinucleotide"
  misc_feature (61)..(61): /note="Nucleotide may be methylated to form 5-methylcytosine"
acaagataagcagaagctgcccatgcacacacatgttggcaaagccatgtgcggtgttaccgtgggccttggggaagatgcagtgtagaaggagtgtgtgcactggtgtgtggccctgggag

SEQ ID NO: 25977 - DNA, 122 bp, Homo sapiens
  misc_feature (61)..(62): /note="This region represents a CpG dinucleotide"
  misc_feature (61)..(61): /note="Nucleotide may be methylated to form 5-methylcytosine"
cccctgacccaaaccccattcagggcattccaatccagctcatgattttcagccacacggcgaggggatgaagccatttcaggttatgcacttgatcccaaagagttttttgtgcttcgctc

SEQ ID NO: 25978 - DNA, 122 bp, Homo sapiens
  misc_feature (61)..(62): /note="This region represents a CpG dinucleotide"
  misc_feature (61)..(61): /note="Nucleotide may be methylated to form 5-methylcytosine"
attatgcactgctgaactggtgatgggtatttctattgacaacttccccgccttaagatccgaggaggtttctaaagcatctttctctactgtttacatgaaaccaaggacactgggcagac

SEQ ID NO: 25979 - DNA, 122 bp, Homo sapiens
  misc_feature (61)..(62): /note="This region represents a CpG dinucleotide"
  misc_feature (61)..(61): /note="Nucleotide may be methylated to form 5-methylcytosine"
tgactgttctgtggtgatgatactgctgtgtgccactcccagcttcaccatgtaaaaggccgcacctggcccacctggctccgtcccttctgctcacaccaacctctcccgggtcggggtct

SEQ ID NO: 25980 - DNA, 122 bp, Homo sapiens
  misc_feature (61)..(62): /note="This region represents a CpG dinucleotide"
  misc_feature (61)..(61): /note="Nucleotide may be methylated to form 5-methylcytosine"
acctcatgatccatccgcctcagcctcccaaagtgctgggattacaggtgtgagccattacgcccggcaagggttcctactttcacagaattactccagggattatgtgtcagggtggtaac

SEQ ID NO: 25981 - DNA, 122 bp, Homo sapiens
  misc_feature (61)..(62): /note="This region represents a CpG dinucleotide"
  misc_feature (61)..(61): /note="Nucleotide may be methylated to form 5-methylcytosine"
caccccagccctacccagccctgtccctcaccgcagccttgtagatgtcatccatgctggcggctcacaggacagcttgctggggttgccagccggcccttgacttaaatagccctgccccg

SEQ ID NO: 25982 - DNA, 122 bp, Homo sapiens
  misc_feature (61)..(62): /note="This region represents a CpG dinucleotide"
  misc_feature (61)..(61): /note="Nucleotide may be methylated to form 5-methylcytosine"
gaggaagggagaagagatggcagggagggcgtgggcggcacctgtggtcgagttggcctgcgtttcggatccgagggcgacgcagacggagctcagaaccagacccagccagagaaggcctc

SEQ ID NO: 25983 - DNA, 122 bp, Homo sapiens
  misc_feature (61)..(62): /note="This region represents a CpG dinucleotide"
  misc_feature (61)..(61): /note="Nucleotide may be methylated to form 5-methylcytosine"
acaaagacactccaagcaagagaaacaacctgagcagaagcacccaggtatgacagaaaacgtagagaggaaaggcttccaaaagcaacagagattcacaggaagctccacagaaaaacggg

SEQ ID NO: 25984 - DNA, 122 bp, Homo sapiens
  misc_feature (61)..(62): /note="This region represents a CpG dinucleotide"
  misc_feature (61)..(61): /note="Nucleotide may be methylated to form 5-methylcytosine"
cactagaatccacaccaccttcaatctcatggaatatctgtgtagtttattttcccagtgcgtgcaaggctttcctcaacagcggagagcttttgcatagcaggagaacaaactaggatagc

SEQ ID NO: 25985 - DNA, 122 bp, Homo sapiens
  misc_feature (61)..(62): /note="This region represents a CpG dinucleotide"
  misc_feature (61)..(61): /note="Nucleotide may be methylated to form 5-methylcytosine"
tgatgtgagatgataaaatgcctacgtgataagatgcagtgaggtgaatgatgcaggcatcgtgacatagtgttaagctactattgacctacatctgaaggacgatcagctgcttcaggtaa

SEQ ID NO: 25986 - DNA, 122 bp, Homo sapiens
  misc_feature (61)..(62): /note="This region represents a CpG dinucleotide"
  misc_feature (61)..(61): /note="Nucleotide may be methylated to form 5-methylcytosine"
gaccaggtaggcggttcccaacagcccatccaccccagaacctgcaggccaggtaggagacggtccccaacagcccgccagccccagaaactgcaggccaggtaggcgaggttcccgacagc

SEQ ID NO: 25987 - DNA, 122 bp, Homo sapiens
  misc_feature (61)..(62): /note="This region represents a CpG dinucleotide"
  misc_feature (61)..(61): /note="Nucleotide may be methylated to form 5-methylcytosine"
caaaaagccaattgctctttgcacatttccaattctatttcttcttttccttctgtagcccgaactgatgaaacagcccaaacttaccaaaacacagaaacatttatttctgaaatacccag

SEQ ID NO: 25988 - DNA, 122 bp, Homo sapiens
  misc_feature (61)..(62): /note="This region represents a CpG dinucleotide"
  misc_feature (61)..(61): /note="Nucleotide may be methylated to form 5-methylcytosine"
tggaataaagcacacattttatttttgaatccagtctctgttccccacagagcacgtaagcgtgaaggcaggtctgtctgcttccttcacgcccatatcccagcacttactcagagcctatc

SEQ ID NO: 25989 - DNA, 122 bp, Homo sapiens
  misc_feature (61)..(62): /note="This region represents a CpG dinucleotide"
  misc_feature (61)..(61): /note="Nucleotide may be methylated to form 5-methylcytosine"
ggcatggaagtcggcagccagtagaccatgtatgtgcatcaacggtgggtgttgagggcacgattcccagaggagaatgtcctaacagctgtctggcctgagccaacatacttacgaccaag

SEQ ID NO: 25990 - DNA, 122 bp, Homo sapiens
  misc_feature (61)..(62): /note="This region represents a CpG dinucleotide"
  misc_feature (61)..(61): /note="Nucleotide may be methylated to form 5-methylcytosine"
aaccagttgggctgcttccctctgacgcacttgcttctcatccggggagcggggagtctccgtcttcacaagtgggcaggcttcactgagcccagaggcccctggggcagaaggtgaggtgt

SEQ ID NO: 25991 - DNA, 122 bp, Homo sapiens
  misc_feature (61)..(62): /note="This region represents a CpG dinucleotide"
  misc_feature (61)..(61): /note="Nucleotide may be methylated to form 5-methylcytosine"
gcctggcggggcaaagggagggagccatgattacaggagcccagagagctatggcaggagcggtgattgaaggtggaaggaaataaccgctgccccaaccctgagctggcagggaggagtga

SEQ ID NO: 25992 - DNA, 122 bp, Homo sapiens
  misc_feature (61)..(62): /note="This region represents a CpG dinucleotide"
  misc_feature (61)..(61): /note="Nucleotide may be methylated to form 5-methylcytosine"
ctagattctgagtcatgtaggtgctgcatgcctagatgactaaatcttcttactcacacacgtaagaaaaacacacaccctggacaccaaggctcaaatgaaagtcaaaaatgcttacctgg

SEQ ID NO: 25993 - DNA, 122 bp, Homo sapiens
  misc_feature (61)..(62): /note="This region represents a CpG dinucleotide"
  misc_feature (61)..(61): /note="Nucleotide may be methylated to form 5-methylcytosine"
aactaagctgtgagctggggctgcaatcatcttaggtcttgaatagggaaggatcagcttcgaaggtcattgttgtgatgattggcaggtctcaggtgtttgtaggttgtcagatggagaca

SEQ ID NO: 25994 - DNA, 122 bp, Homo sapiens
  misc_feature (61)..(62): /note="This region represents a CpG dinucleotide"
  misc_feature (61)..(61): /note="Nucleotide may be methylated to form 5-methylcytosine"
aaataaacattatgtacttggtcttgttattatgaaaaaaaaccctgcctctaaacatggcgagatatatcttgcactaccagtatttcctgatggggctgctgttggccttttagtccaag

SEQ ID NO: 25995 - DNA, 122 bp, Homo sapiens
  misc_feature (61)..(62): /note="This region represents a CpG dinucleotide"
  misc_feature (61)..(61): /note="Nucleotide may be methylated to form 5-methylcytosine"
ggtgactagatgggtctgttggtgcaacggtgtctgtggacttacacaattacagccactcgcagatgttatcctggaactggatcctctcagtggtcagactatcatttgacacatctgtt

SEQ ID NO: 25996 - DNA, 122 bp, Homo sapiens
  misc_feature (61)..(62): /note="This region represents a CpG dinucleotide"
  misc_feature (61)..(61): /note="Nucleotide may be methylated to form 5-methylcytosine"
tctgaaaatgaatctgaagcatatttagtttttaaaggaattgttgcttcctgcctattacgtagaattgcctcatgtctgcccattatcaggaactaatgtgttatttaaagttttttttt

SEQ ID NO: 25997 - DNA, 122 bp, Homo sapiens
  misc_feature (61)..(62): /note="This region represents a CpG dinucleotide"
  misc_feature (61)..(61): /note="Nucleotide may be methylated to form 5-methylcytosine"
caatgtagaagtgccactgcgctcagttaacccaaagaattgcaagaaataacaaactgtcggctgggcacagtggctcacacctataatcccagcactttgaaaggccgaggcaggtggat

SEQ ID NO: 25998 - DNA, 122 bp, Homo sapiens
  misc_feature (61)..(62): /note="This region represents a CpG dinucleotide"
  misc_feature (61)..(61): /note="Nucleotide may be methylated to form 5-methylcytosine"
acctgtcccccaggatgcggatcagagggccagtgatgctgaccacggagggcctcagggcgtcagccgaggtcaggcggattaccaagcctaaggctttggctgcctcctccttctgctca

SEQ ID NO: 25999 - DNA, 122 bp, Homo sapiens
  misc_feature (61)..(62): /note="This region represents a CpG dinucleotide"
  misc_feature (61)..(61): /note="Nucleotide may be methylated to form 5-methylcytosine"
taactcaccatcagaaaccctacactcaggctagacttgttctgtggcttaaaactgcagcgtctcagccgggtggagtggctcatacctataatcccagcactttgagaggccgaggcagg

SEQ ID NO: 26000 - DNA, 122 bp, Homo sapiens
  misc_feature (61)..(62): /note="This region represents a CpG dinucleotide"
  misc_feature (61)..(61): /note="Nucleotide may be methylated to form 5-methylcytosine"
gggattacaggtgtgagccaccacacccagcctactcctactcttgtacttgacgccagacgggccctgacaaggtgacacacactccaagattggaaacagccatcaggagccggatgggc

SEQ ID NO: 26001 - DNA, 122 bp, Homo sapiens
  misc_feature (61)..(62): /note="This region represents a CpG dinucleotide"
  misc_feature (61)..(61): /note="Nucleotide may be methylated to form 5-methylcytosine"
caggaagtgctaacaatctggaaacagcctgtgcctgaagaagagctcaattcagcatgacggtagaccaggctggtactgtaactcttggttctgctcagaagctggtcttaacgggctct

SEQ ID NO: 26002 - DNA, 122 bp, Homo sapiens
  misc_feature (61)..(62): /note="This region represents a CpG dinucleotide"
  misc_feature (61)..(61): /note="Nucleotide may be methylated to form 5-methylcytosine"
cagttggggagttcggatgtccccttctggggctttcatcttctaacctcctctcccaagcgctcagccaaagggcagcacagagcaccctaccctaaggtgtgacgccccagctggcagga

SEQ ID NO: 26003 - DNA, 122 bp, Homo sapiens
  misc_feature (61)..(62): /note="This region represents a CpG dinucleotide"
  misc_feature (61)..(61): /note="Nucleotide may be methylated to form 5-methylcytosine"
gtattttcacgtctttactatactactttttttttcagtattatttcttgcaacacagaccgttcgggatttctttttcttcctgaaatatatcatttagaaatttctttgggtaggaaata

SEQ ID NO: 26004 - DNA, 122 bp, Homo sapiens
  misc_feature (61)..(62): /note="This region represents a CpG dinucleotide"
  misc_feature (61)..(61): /note="Nucleotide may be methylated to form 5-methylcytosine"
tggctttccatatctctgctctgatttatcaatttttattttacttcctctattccaaaccgtgaggtcatcctcccagctggcctcactcttctccactttggtttcctctgtggttccag

SEQ ID NO: 26005 - DNA, 122 bp, Homo sapiens
  misc_feature (61)..(62): /note="This region represents a CpG dinucleotide"
  misc_feature (61)..(61): /note="Nucleotide may be methylated to form 5-methylcytosine"
ggtctgtagttgctgcagagtaaatggtattcatgtgtctattcagtgaatcaacaaatacgtactgagcacctgctaaatgacagttactgtgcttgacagtgggtatgtgcaatggtgaa

SEQ ID NO: 26006 - DNA, 122 bp, Homo sapiens
  misc_feature (61)..(62): /note="This region represents a CpG dinucleotide"
  misc_feature (61)..(61): /note="Nucleotide may be methylated to form 5-methylcytosine"
ctaattacctgaactctaagccctgaacttgctggggagcgagtaggcactgattcagggcgtcctcatcctggagatggtgaaaggcaggccggctcctctgcagcagagccagggctgcc

SEQ ID NO: 26007 - DNA, 122 bp, Homo sapiens
  misc_feature (61)..(62): /note="This region represents a CpG dinucleotide"
  misc_feature (61)..(61): /note="Nucleotide may be methylated to form 5-methylcytosine"
catgttaagttttcttcccaggccaggctatcgggttacaacttctaataaaccctcctgcgaaaagacatttctttgtctggggaccaccgagaactaaccaaacaaaacaccttcaattg

SEQ ID NO: 26008 - DNA, 122 bp, Homo sapiens
  misc_feature (61)..(62): /note="This region represents a CpG dinucleotide"
  misc_feature (61)..(61): /note="Nucleotide may be methylated to form 5-methylcytosine"
gttcagcaagtactggcagcacttaacacgtgcagtaaagcagtgaggctgttttgccaccgtgacaatgcagttgagttttgcctaacgtgaaaatactaagtttctgtgtattctctgct

SEQ ID NO: 26009 - DNA, 122 bp, Homo sapiens
  misc_feature (61)..(62): /note="This region represents a CpG dinucleotide"
  misc_feature (61)..(61): /note="Nucleotide may be methylated to form 5-methylcytosine"
gctgcagtgaccagaaaggcctgaacttccccagcccatcctggggcccttagccaccatcgtcacttcctgccaccagggttaacacccaactaggaacttgaacttttcatctgcctggg

SEQ ID NO: 26010 - DNA, 122 bp, Homo sapiens
  misc_feature (61)..(62): /note="This region represents a CpG dinucleotide"
  misc_feature (61)..(61): /note="Nucleotide may be methylated to form 5-methylcytosine"
attggggttaaggcataatcaatatcatatatggagtgtctggcctattctgcataaacacgggcacttcatattattaaggagtctataatgccgaggaagcatatggcaggacactgcag

SEQ ID NO: 26011 - DNA, 122 bp, Homo sapiens
  misc_feature (61)..(62): /note="This region represents a CpG dinucleotide"
  misc_feature (61)..(61): /note="Nucleotide may be methylated to form 5-methylcytosine"
gtgaaagagaattagagtatacctccctacattttacaactcacattaaaactgtcataacgccctgaaagtataggggagaaagtaagagctgaattgctatttttctgacattagtaagc

SEQ ID NO: 26012 - DNA, 122 bp, Homo sapiens
  misc_feature (61)..(62): /note="This region represents a CpG dinucleotide"
  misc_feature (61)..(61): /note="Nucleotide may be methylated to form 5-methylcytosine"
ttgtggggcctctgtctgagcaaacacatggcttttgtggacctttctgtgtgcaccccacgaacatggaggcagaatgagttacatggttcagtaacatgctcaagatgcataccttgagc

SEQ ID NO: 26013 - DNA, 122 bp, Homo sapiens
  misc_feature (61)..(62): /note="This region represents a CpG dinucleotide"
  misc_feature (61)..(61): /note="Nucleotide may be methylated to form 5-methylcytosine"
atagcaagtctcaccatgtgttgaaataatttatttcaacacttaatgcatcacctgtcccgtatttccacatgttgtgtcatcaccatttgacctcaacccattgttaaatatttaatagt

SEQ ID NO: 26014 - DNA, 122 bp, Homo sapiens
  misc_feature (61)..(62): /note="This region represents a CpG dinucleotide"
  misc_feature (61)..(61): /note="Nucleotide may be methylated to form 5-methylcytosine"
gctccaactcgttgtcctagaccatccagtgttagcatttttctcatgagatgaacatttcgttataataatgacagtagctgtcatttgctgagggctttctgcatgtcaggcagcctact

SEQ ID NO: 26015 - DNA, 122 bp, Homo sapiens
  misc_feature (61)..(62): /note="This region represents a CpG dinucleotide"
  misc_feature (61)..(61): /note="Nucleotide may be methylated to form 5-methylcytosine"
aggcctgactgaatccaacagtgccttaaaaacagttactctttaaagtaaatttcttcacgtcatgtagagctttcaaggttaatcatttccctaagcagctggcatgtctaacagaccca

SEQ ID NO: 26016 - DNA, 122 bp, Homo sapiens
  misc_feature (61)..(62): /note="This region represents a CpG dinucleotide"
  misc_feature (61)..(61): /note="Nucleotide may be methylated to form 5-methylcytosine"
ctgcaagcgacgtcaggaccgcacatgtgcccccagggctcccgccgcgaactcagagggcgcccgaggcccggcccgcggcccctgagcctcagagaacccaagcccctccctgaaccgcg

SEQ ID NO: 26017 - DNA, 122 bp, Homo sapiens
  misc_feature (61)..(62): /note="This region represents a CpG dinucleotide"
  misc_feature (61)..(61): /note="Nucleotide may be methylated to form 5-methylcytosine"
ctgagcggagctggggtccctggccagaggcggaacaaaatggggtcatggccaggaagacgcgctaacgcagtaagagtcactcagagggccggaactgccggaactgccgaagacccgag

SEQ ID NO: 26018 - DNA, 122 bp, Homo sapiens
  misc_feature (61)..(62): /note="This region represents a CpG dinucleotide"
  misc_feature (61)..(61): /note="Nucleotide may be methylated to form 5-methylcytosine"
gatcaagagagagtgaacaaaaacaatcaatatggaatctgtgagaagatctcacagcaccggcaggaagaaaattgtcccgaaggttcagatgaagagtttattatctcagaaatgatttt

SEQ ID NO: 26019 - DNA, 122 bp, Homo sapiens
  misc_feature (61)..(62): /note="This region represents a CpG dinucleotide"
  misc_feature (61)..(61): /note="Nucleotide may be methylated to form 5-methylcytosine"
gataaatgggtgaacagaatgtgatccacccatacaacagaatgtgactcagccatggaacgtcatggggctctgacccaggccacagcatgggtgagccctaaggacgtcacgctcagcgc

SEQ ID NO: 26020 - DNA, 122 bp, Homo sapiens
  misc_feature (61)..(62): /note="This region represents a CpG dinucleotide"
  misc_feature (61)..(61): /note="Nucleotide may be methylated to form 5-methylcytosine"
ggtacctagacattgtctctgcactctgctggcatattttcccctggaccacgaacccttcgtacctagtaacttgccacctgtgtttataaataccagcaatttgatttacagggtgaatt

SEQ ID NO: 26021 - DNA, 122 bp, Homo sapiens
  misc_feature (61)..(62): /note="This region represents a CpG dinucleotide"
  misc_feature (61)..(61): /note="Nucleotide may be methylated to form 5-methylcytosine"
gacctcatttcatcttttccagagtttgtgtgtccaatgcatctgagtttgagaataaaccgcacgtattattacaggaagctgtcagtgctgattagaggaaactaacaaagagaaggagg

SEQ ID NO: 26022 - DNA, 122 bp, Homo sapiens
  misc_feature (61)..(62): /note="This region represents a CpG dinucleotide"
  misc_feature (61)..(61): /note="Nucleotide may be methylated to form 5-methylcytosine"
aactgagagaagaaactcatgcctacctctgtgatcccataaggtcttacatgtgcttctcggccttactagttcacacatgtcatcctggtctgtagctaatttgagtacaagtctacatc

SEQ ID NO: 26023 - DNA, 122 bp, Homo sapiens
  misc_feature (61)..(62): /note="This region represents a CpG dinucleotide"
  misc_feature (61)..(61): /note="Nucleotide may be methylated to form 5-methylcytosine"
gtcaggaggcaaaagagagaaggattgagagactgttattttgaattcaagtagcaaaaacgttagaaaagacaggtcttgaacattgaggaatctgagttattgtcaccataataaatcag

SEQ ID NO: 26024 - DNA, 122 bp, Homo sapiens
  misc_feature (61)..(62): /note="This region represents a CpG dinucleotide"
  misc_feature (61)..(61): /note="Nucleotide may be methylated to form 5-methylcytosine"
gagctgaggacaggtcagtgagggcactaggctacaggaagaggcatttcctatagatgacggctgtaaaattttaagctgagttcctccaggaagtcatagagtaattagtggtttttttc

SEQ ID NO: 26025 - DNA, 122 bp, Homo sapiens
  misc_feature (61)..(62): /note="This region represents a CpG dinucleotide"
  misc_feature (61)..(61): /note="Nucleotide may be methylated to form 5-methylcytosine"
tcactctctagtcaactgcacttgctactaaactgtgattcactggctgttagtggtatccgcatattcaggatgcaacaccctctctagtcaactgctctttccactaaactgtgattcac

SEQ ID NO: 26026 - DNA, 122 bp, Homo sapiens
  misc_feature (61)..(62): /note="This region represents a CpG dinucleotide"
  misc_feature (61)..(61): /note="Nucleotide may be methylated to form 5-methylcytosine"
aaaacactaagtgctgagcctgctacagacaaattattccatgatgctggttggctgttgcgacacagtccacaccccgagatgtggaggcagccagtatccatctcttgctctacctgtta

SEQ ID NO: 26027 - DNA, 122 bp, Homo sapiens
  misc_feature (61)..(62): /note="This region represents a CpG dinucleotide"
  misc_feature (61)..(61): /note="Nucleotide may be methylated to form 5-methylcytosine"
ttgaagtgatactgagtatgaatcatcctctctgaactgcgtcacagaattacccactgtcgggaaacttaaagatagtttcagtgtttaaaaattctcaggaaattctttcaaatgttcaa

SEQ ID NO: 26028 - DNA, 122 bp, Homo sapiens
  misc_feature (61)..(62): /note="This region represents a CpG dinucleotide"
  misc_feature (61)..(61): /note="Nucleotide may be methylated to form 5-methylcytosine"
tcacccaggaaacatgcaaaattgtcagcacttgtttatttaatggcaccttgcaaaccacgttcacaccacagtgcaggagctgctcatctaaggagctaagaccctcctgatggctctga

SEQ ID NO: 26029 - DNA, 122 bp, Homo sapiens
  misc_feature (61)..(62): /note="This region represents a CpG dinucleotide"
  misc_feature (61)..(61): /note="Nucleotide may be methylated to form 5-methylcytosine"
tgaacacactgggactagtagatttttctgaacctgtccttaaagctcttctcgaaaccacgtgttgatcctctgtctattttctcatctctctgtttctccctccaccctcattcttcctc

SEQ ID NO: 26030 - DNA, 122 bp, Homo sapiens
  misc_feature (61)..(62): /note="This region represents a CpG dinucleotide"
  misc_feature (61)..(61): /note="Nucleotide may be methylated to form 5-methylcytosine"
ggctccagaggccgcacttgacactcctcgaacattgcctcaattactcagtctctggtgcgagccagaattgcaggacctgctaccttgcgctctgctgtgcatacaaagctattaagtcg

SEQ ID NO: 26031 - DNA, 122 bp, Homo sapiens
  misc_feature (61)..(62): /note="This region represents a CpG dinucleotide"
  misc_feature (61)..(61): /note="Nucleotide may be methylated to form 5-methylcytosine"
caagggaaacacatctctcaaacttaacctgattttcaaactgaattcctgattcccacccgcaaacttgtcactcctcctgtcctcccgatctttgtatcctccacccagctggaatcacc

SEQ ID NO: 26032 - DNA, 122 bp, Homo sapiens
  misc_feature (61)..(62): /note="This region represents a CpG dinucleotide"
  misc_feature (61)..(61): /note="Nucleotide may be methylated to form 5-methylcytosine"
tgaaaccaggaagtggacgggaacctagtttggccagtgggatactgctggttttgacaacgaggaacagaaactgaagtttctcaaacttactggtggcttcaaaaacctgtccccttcgt

SEQ ID NO: 26033 - DNA, 122 bp, Homo sapiens
  misc_feature (61)..(62): /note="This region represents a CpG dinucleotide"
  misc_feature (61)..(61): /note="Nucleotide may be methylated to form 5-methylcytosine"
gtgtttccacgctctctcccagctcctcaccagatgggttggcagcaatgatgatgatgacgctcatcttgcgtcattcgagattgcccaactgggatattgtatcaggttggtgcaaaagt

SEQ ID NO: 26034 - DNA, 122 bp, Homo sapiens
  misc_feature (61)..(62): /note="This region represents a CpG dinucleotide"
  misc_feature (61)..(61): /note="Nucleotide may be methylated to form 5-methylcytosine"
catctgaattcctaacacatcaaaatcagattccattctggacattcgtttttttgttgacgctgtgattgaggtctcataaaaagaaggtgccatgcctaggacaaatgaggaaggagagg

SEQ ID NO: 26035 - DNA, 122 bp, Homo sapiens
  misc_feature (61)..(62): /note="This region represents a CpG dinucleotide"
  misc_feature (61)..(61): /note="Nucleotide may be methylated to form 5-methylcytosine"
tcaagacaattgatattcttcctccctactgaacctgggctactgtctataataagtcatcgtgaaaagaggtggggtacaaaggaatataaataaaccaccgacacctcccagaccctgga

SEQ ID NO: 26036 - DNA, 122 bp, Homo sapiens
  misc_feature (61)..(62): /note="This region represents a CpG dinucleotide"
  misc_feature (61)..(61): /note="Nucleotide may be methylated to form 5-methylcytosine"
ggctctggagtcagagtgcctaagttccagtactggctttgccacctattagctcatgaccgtgtacaatttatttaatttcactgagacacaatttcctcatccttgaaatggggctaaga

SEQ ID NO: 26037 - DNA, 122 bp, Homo sapiens
  misc_feature (61)..(62): /note="This region represents a CpG dinucleotide"
  misc_feature (61)..(61): /note="Nucleotide may be methylated to form 5-methylcytosine"
acaaatttattttagtgctgtgataatacttgggatgagctatttatcccatcttgactccgtctcatggggtaatgatttttgcacaggaacggttaatccagttgaaaatcatcacctcc

SEQ ID NO: 26038 - DNA, 122 bp, Homo sapiens
  misc_feature (61)..(62): /note="This region represents a CpG dinucleotide"
  misc_feature (61)..(61): /note="Nucleotide may be methylated to form 5-methylcytosine"
gctgagcagctttctgtcccactgagcctccctttccaggttggggcaggcaagtggattcgacaggctgccagaagactgcaaggtcattgggagttttaatctgtgactgtgtcatgaag

SEQ ID NO: 26039 - DNA, 122 bp, Homo sapiens
  misc_feature (61)..(62): /note="This region represents a CpG dinucleotide"
  misc_feature (61)..(61): /note="Nucleotide may be methylated to form 5-methylcytosine"
accccctactctcactccacgtgaggggataggatggagcaagatgaaggctgagtatgacgggcccacaagtcctgttcttggcccgtgttctctaatcataattacagccactgcctgtt

SEQ ID NO: 26040 - DNA, 122 bp, Homo sapiens
  misc_feature (61)..(62): /note="This region represents a CpG dinucleotide"
  misc_feature (61)..(61): /note="Nucleotide may be methylated to form 5-methylcytosine"
cccactggctcactttccatcagctctaaaagtttcctgactatccaggggccacagctgcggttgcctgggcttttccattcctgagactaaaagaatgttcacagctggaacctgcacca

SEQ ID NO: 26041 - DNA, 122 bp, Homo sapiens
  misc_feature (61)..(62): /note="This region represents a CpG dinucleotide"
  misc_feature (61)..(61): /note="Nucleotide may be methylated to form 5-methylcytosine"
ttttgctttgcttcagtggtcaaaatgaaggacccattcaagggtaagaccagtcatagacgcacaatgggaatgctggaggaacactgtgagggggagggagttgggaagctaaacaaagc

SEQ ID NO: 26042 - DNA, 122 bp, Homo sapiens
  misc_feature (61)..(62): /note="This region represents a CpG dinucleotide"
  misc_feature (61)..(61): /note="Nucleotide may be methylated to form 5-methylcytosine"
catctctaaaacgggaacaacagtacttatatcataggtttgttatgagcattaataatacgttgtctgttacatgggaatcacttagcaaagtgtctagttcattgcagtcgttatcatca

SEQ ID NO: 26043 - DNA, 122 bp, Homo sapiens
  misc_feature (61)..(62): /note="This region represents a CpG dinucleotide"
  misc_feature (61)..(61): /note="Nucleotide may be methylated to form 5-methylcytosine"
aaacagccttctgttgctaaaggaaacaggacgcttctggattcacgtatgtaagagcagcgagaagctacaaaggaagccctgggtccacaggcacaccctaagcctttccaggcagatgc

SEQ ID NO: 26044 - DNA, 122 bp, Homo sapiens
  misc_feature (61)..(62): /note="This region represents a CpG dinucleotide"
  misc_feature (61)..(61): /note="Nucleotide may be methylated to form 5-methylcytosine"
tatgaattttagtaactcggtgtgacagccagcctccaagacggctcctagtgattcacacgcttatgtagtcccattccacagtggatggggtgacctgtgtaacccaacaggatagtgca

SEQ ID NO: 26045 - DNA, 122 bp, Homo sapiens
  misc_feature (61)..(62): /note="This region represents a CpG dinucleotide"
  misc_feature (61)..(61): /note="Nucleotide may be methylated to form 5-methylcytosine"
tcttcttgtctttcttcccaactttcaaaaatggcgcttattactcaagaaaaaccacaacgctttgagctggcactagttagctcaattgaaggtcagattttgcatagaagattcagaga

SEQ ID NO: 26046 - DNA, 122 bp, Homo sapiens
  misc_feature (61)..(62): /note="This region represents a CpG dinucleotide"
  misc_feature (61)..(61): /note="Nucleotide may be methylated to form 5-methylcytosine"
agcaatgcctgtgagcccttgcttcaccagcattagcatcatttggaagcttgttagacacgcagaatctcaggccccaccccagacctgctgaatcaggatttgcaactgcaattagcccc

SEQ ID NO: 26047 - DNA, 122 bp, Homo sapiens
  misc_feature (61)..(62): /note="This region represents a CpG dinucleotide"
  misc_feature (61)..(61): /note="Nucleotide may be methylated to form 5-methylcytosine"
gattctcactgaaatctcactgccctcctggaaatattaccggatgttttactgtcatagcgaagtgagagtaagctgctcactgaggatcaaagagcttgtgacagacctaagactcaagt

SEQ ID NO: 26048 - DNA, 122 bp, Homo sapiens
  misc_feature (61)..(62): /note="This region represents a CpG dinucleotide"
  misc_feature (61)..(61): /note="Nucleotide may be methylated to form 5-methylcytosine"
tggtctacagcattatttcactttcatttgtaatcagacttcaccccgaagcaaatgcatcgtttacagggaaagaatattctgtggtacaatgaattctcgtccctcctgcccagtcacta

SEQ ID NO: 26049 - DNA, 122 bp, Homo sapiens
  misc_feature (61)..(62): /note="This region represents a CpG dinucleotide"
  misc_feature (61)..(61): /note="Nucleotide may be methylated to form 5-methylcytosine"
aatccctctcctctgccttcatctctgttttccttggtgcaccttcatgtgcctcttccccggtccacgtgcatcttcatcaacacttgatttgtttgtttctgtgtctcttcccatctgca

SEQ ID NO: 26050 - DNA, 122 bp, Homo sapiens
  misc_feature (61)..(62): /note="This region represents a CpG dinucleotide"
  misc_feature (61)..(61): /note="Nucleotide may be methylated to form 5-methylcytosine"
tgaaacctattgcacactatttgcaactaaaatacagggtgctctttattaccaattatacgagctctgtatggtcaattacttcttttacaagacaattttgatgaatacaataatgttgc

SEQ ID NO: 26051 - DNA, 122 bp, Homo sapiens
  misc_feature (61)..(62): /note="This region represents a CpG dinucleotide"
  misc_feature (61)..(61): /note="Nucleotide may be methylated to form 5-methylcytosine"
gcattgatttcctgttcatcggggtatccagggtaaccctgcaatggacacagataagcacgtcattcatgtcgctcctttctaacaacaggtgcccagtcccccttggccaggaaaacgca

SEQ ID NO: 26052 - DNA, 122 bp, Homo sapiens
  misc_feature (61)..(62): /note="This region represents a CpG dinucleotide"
  misc_feature (61)..(61): /note="Nucleotide may be methylated to form 5-methylcytosine"
tcacaaactgaggcatgtccatgttttggtggtctcatggtttgtcactggccactctgccgaggggccccaagctgactctcaacctgctggactgggtgactcttgtctgtgcagagagg

SEQ ID NO: 26053 - DNA, 122 bp, Homo sapiens
  misc_feature (61)..(62): /note="This region represents a CpG dinucleotide"
  misc_feature (61)..(61): /note="Nucleotide may be methylated to form 5-methylcytosine"
tccaggcacccatatctatgtgggactatattgctgtaatgcagtcatgaaaatctgcggcgagggcctggactttctgaactcaataagccctctgggtaggggctaacatttctacaagg

SEQ ID NO: 26054 - DNA, 122 bp, Homo sapiens
  misc_feature (61)..(62): /note="This region represents a CpG dinucleotide"
  misc_feature (61)..(61): /note="Nucleotide may be methylated to form 5-methylcytosine"
aatgaagactggagctatcttcattaaatcctaattagtcttgacaaacaatgtgtttggcgatccttggcctggccactgtatgcccatttacctactcagcaggttgtaattttccacat

SEQ ID NO: 26055 - DNA, 122 bp, Homo sapiens
  misc_feature (61)..(62): /note="This region represents a CpG dinucleotide"
  misc_feature (61)..(61): /note="Nucleotide may be methylated to form 5-methylcytosine"
caatggaaacttctactgaattctttctagcctgtggtcagagttggttttgttcacatacgtagtttattatgttgggtttcaggaatgtgccagtgactctgcaaggtgctggggatgta

SEQ ID NO: 26056 - DNA, 122 bp, Homo sapiens
  misc_feature (61)..(62): /note="This region represents a CpG dinucleotide"
  misc_feature (61)..(61): /note="Nucleotide may be methylated to form 5-methylcytosine"
caggaagaaatgagccggcagagcagctggcggggtgtgaaggctggggacagcagctggcgggggagctgggggctgggggaagtggggagaggaagaaaggaggctgttctgtttccttt

SEQ ID NO: 26057 - DNA, 122 bp, Homo sapiens
  misc_feature (61)..(62): /note="This region represents a CpG dinucleotide"
  misc_feature (61)..(61): /note="Nucleotide may be methylated to form 5-methylcytosine"
taatggccaaactcaaactagagtgtccacttcttcctctgggttctacactcagcaaagcggaggctgtcagtccagacaatactatttaacagaagccagaaggtgaacttcctgttaag

SEQ ID NO: 26058 - DNA, 122 bp, Homo sapiens
  misc_feature (61)..(62): /note="This region represents a CpG dinucleotide"
  misc_feature (61)..(61): /note="Nucleotide may be methylated to form 5-methylcytosine"
ttagtcaggtaggcagaactctaatcaggaattgaaataaagcattagtattgtgataagcgaagaacagaggcctatgagaacatagagcagggagttcttaaactgatctacgatctaga

SEQ ID NO: 26059 - DNA, 122 bp, Homo sapiens
  misc_feature (61)..(62): /note="This region represents a CpG dinucleotide"
  misc_feature (61)..(61): /note="Nucleotide may be methylated to form 5-methylcytosine"
tgattcttgctaagcttgcaatgttcttgcaatgatcaatactggtagccactccattaccgtacccacggtttagaaggtagtttgtatttttccttctttttcttttaccacaaacttta

SEQ ID NO: 26060 - DNA, 122 bp, Homo sapiens
  misc_feature (61)..(62): /note="This region represents a CpG dinucleotide"
  misc_feature (61)..(61): /note="Nucleotide may be methylated to form 5-methylcytosine"
aagataacgataacgatgacaatgctggtaatagtgatgacaaaagttagaaccttctgacgcagcttttgacttatgtgctacatccagtgttggagcttggtttttatgggctgggtaag

SEQ ID NO: 26061 - DNA, 122 bp, Homo sapiens
  misc_feature (61)..(62): /note="This region represents a CpG dinucleotide"
  misc_feature (61)..(61): /note="Nucleotide may be methylated to form 5-methylcytosine"
gcacaagcagttcaggcaccaaattgtgctgattggatttaaaggtatctaccacagggacgatcacaaatacaccagaaagattctgccagcactttcaggtgatatttcccaaggtgata

SEQ ID NO: 26062 - DNA, 122 bp, Homo sapiens
  misc_feature (61)..(62): /note="This region represents a CpG dinucleotide"
  misc_feature (61)..(61): /note="Nucleotide may be methylated to form 5-methylcytosine"
ctgcctttatgagccgtaacactcaaccgcgaaagtctgtagcttcactcctgaagctagcgagaccacgaacccaccgggaagaagaaaaaactccagacgcaccgccttcagagctgtaa

SEQ ID NO: 26063 - DNA, 122 bp, Homo sapiens
  misc_feature (61)..(62): /note="This region represents a CpG dinucleotide"
  misc_feature (61)..(61): /note="Nucleotide may be methylated to form 5-methylcytosine"
aaatagagggagattatattttataagtagtcattcatattaagttgagccacatgaaatcgccatttttctatgtaaaatgattggatattggcaatttcatggttcatcctaatacttcc

SEQ ID NO: 26064 - DNA, 122 bp, Homo sapiens
  misc_feature (61)..(62): /note="This region represents a CpG dinucleotide"
  misc_feature (61)..(61): /note="Nucleotide may be methylated to form 5-methylcytosine"
gatgcatccacggagatccaaatgcatataatcacttgaatcaagatctagacagggacgcgtgcagcaggcttcatctgactgattcctgacacgggagagaaagcctaagctccgaatca

SEQ ID NO: 26065 - DNA, 122 bp, Homo sapiens
  misc_feature (61)..(62): /note="This region represents a CpG dinucleotide"
  misc_feature (61)..(61): /note="Nucleotide may be methylated to form 5-methylcytosine"
cctcagtttcttatgaagttaaacatacacttaacatgtgactcgacaattccactcctacgtatctacccaagagaaatgacaagttatgtctagaaaaggatatgtactctaatgcttat

SEQ ID NO: 26066 - DNA, 122 bp, Homo sapiens
  misc_feature (61)..(62): /note="This region represents a CpG dinucleotide"
  misc_feature (61)..(61): /note="Nucleotide may be methylated to form 5-methylcytosine"
tccaggggctcccaacaagacacctgcaccccctccaccttctacccctaccccatcacccgcaggcagaggaagcagcaaaccacatagtgacatttcaggactaacaaaaagccctccag

SEQ ID NO: 26067 - DNA, 122 bp, Homo sapiens
  misc_feature (61)..(62): /note="This region represents a CpG dinucleotide"
  misc_feature (61)..(61): /note="Nucleotide may be methylated to form 5-methylcytosine"
gtcctgtgttgtgtgctgaggatggagtttatgtatatatggtaactcattctattcttacgagaaccctgtgaggtggatagtatggatattatagccatgctgcaaatgaagagactgag

SEQ ID NO: 26068 - DNA, 122 bp, Homo sapiens
  misc_feature (61)..(62): /note="This region represents a CpG dinucleotide"
  misc_feature (61)..(61): /note="Nucleotide may be methylated to form 5-methylcytosine"
gtgtgattctgcacgtcattcctggctcaacagcctgaatgagtcctgctggatcactctcgtttctgactcacttctcatatctctgtttagatgaagggaaatcttatagataaacaaga

SEQ ID NO: 26069 - DNA, 122 bp, Homo sapiens
  misc_feature (61)..(62): /note="This region represents a CpG dinucleotide"
  misc_feature (61)..(61): /note="Nucleotide may be methylated to form 5-methylcytosine"
agactgcagggtgcagcacagtcatattttaggcagagtcaagcagagaaacctacttgccgctattaaacttattactgccttttccagtgggtgcaaataactttgtctccagtagttac

SEQ ID NO: 26070 - DNA, 122 bp, Homo sapiens
  misc_feature (61)..(62): /note="This region represents a CpG dinucleotide"
  misc_feature (61)..(61): /note="Nucleotide may be methylated to form 5-methylcytosine"
gacacctttgatgtcagtaaatcctactcactttatcttccaaatagatgtgaagcgggccgctgcatctgcaccactgatccaagacatcatcatctctctcttgggtgacagagtggatt

SEQ ID NO: 26071 - DNA, 122 bp, Homo sapiens
  misc_feature (61)..(62): /note="This region represents a CpG dinucleotide"
  misc_feature (61)..(61): /note="Nucleotide may be methylated to form 5-methylcytosine"
cagatcaggaaagttgccagcaccttgcatcgggcctggcacacaggcagcaaatcttgacgggctctagagctcccaccacttggctggaatccctgctggggcagagaagatggagcaaa

SEQ ID NO: 26072 - DNA, 122 bp, Homo sapiens
  misc_feature (61)..(62): /note="This region represents a CpG dinucleotide"
  misc_feature (61)..(61): /note="Nucleotide may be methylated to form 5-methylcytosine"
gaagacttaggttcaccaactccattttctattgtgagaatatattttcctgtatcattgcgagtaacttgaggaatggtgagtaatgaggatgaatcagtgttttcaatgctgtatctggc

SEQ ID NO: 26073 - DNA, 122 bp, Homo sapiens
  misc_feature (61)..(62): /note="This region represents a CpG dinucleotide"
  misc_feature (61)..(61): /note="Nucleotide may be methylated to form 5-methylcytosine"
gataaaggctgtgcttacctgtctgctggtagaaagctgagtttgaggcaaagcagttgtcgaagctgggccgaggccttcacaggtgtgggcacagaggtgaagcaagtgagaaagtatca

SEQ ID NO: 26074 - DNA, 122 bp, Homo sapiens
  misc_feature (61)..(62): /note="This region represents a CpG dinucleotide"
  misc_feature (61)..(61): /note="Nucleotide may be methylated to form 5-methylcytosine"
ggaagtgataacatgagtgtgttgaaattagtggtttgaactgactgaatctcttaaggtcgcctcgaggtctaacatgcttgttaaaaaaggttttcagtatgtattttttatctaatgcc

SEQ ID NO: 26075 - DNA, 122 bp, Homo sapiens
  misc_feature (61)..(62): /note="This region represents a CpG dinucleotide"
  misc_feature (61)..(61): /note="Nucleotide may be methylated to form 5-methylcytosine"
tcattgacatattgtctatggctgcttttaagctacagtggccagttgagcagtcgcatccgtgactacatggcctggagcacctaaaataccacctggccctttacagaataagtttgcca

SEQ ID NO: 26076 - DNA, 122 bp, Homo sapiens
  misc_feature (61)..(62): /note="This region represents a CpG dinucleotide"
  misc_feature (61)..(61): /note="Nucleotide may be methylated to form 5-methylcytosine"
caagaattgccatcatgttgcatgtgctctgagtctcattcttgctgctctgtggaactccgttacttaaatagcccagatccgcatccattctcctgccgagggcacctgagttgtgtcca

SEQ ID NO: 26077 - DNA, 122 bp, Homo sapiens
  misc_feature (61)..(62): /note="This region represents a CpG dinucleotide"
  misc_feature (61)..(61): /note="Nucleotide may be methylated to form 5-methylcytosine"
tgaaggggtggagacactaaagaaagctccagggcaaggatggtcagctacagcatggcccggaagtgcccaacccagtggccatcctctccccaaccccacacccactgagtcagaacctc

SEQ ID NO: 26078 - DNA, 122 bp, Homo sapiens
  misc_feature (61)..(62): /note="This region represents a CpG dinucleotide"
  misc_feature (61)..(61): /note="Nucleotide may be methylated to form 5-methylcytosine"
ttgaagtagctcctgtgaaggctaggagagagaattagggaaacaaggattgttgtacagcgggtcacgtgaggttgaggacattcaatttcaggtcataccagtctgcttagttgtgtgat

SEQ ID NO: 26079 - DNA, 122 bp, Homo sapiens
  misc_feature (61)..(62): /note="This region represents a CpG dinucleotide"
  misc_feature (61)..(61): /note="Nucleotide may be methylated to form 5-methylcytosine"
gtattacttgtcttaaagaatagggtagtattactcactcttgaagtggtactcttgaatcgggtagtattactcttgaatagggtagtattactcacgcctgaatcgctatggcaaaatcc

SEQ ID NO: 26080 - DNA, 122 bp, Homo sapiens
  misc_feature (61)..(62): /note="This region represents a CpG dinucleotide"
  misc_feature (61)..(61): /note="Nucleotide may be methylated to form 5-methylcytosine"
atcatgcaacacgctctccagcagaattagatgacttccttctttgtgtggctttatccacgtggagagttagactaatcctccgtttaagcaatattgttagctgatacagtctaagccac

SEQ ID NO: 26081 - DNA, 122 bp, Homo sapiens
  misc_feature (61)..(62): /note="This region represents a CpG dinucleotide"
  misc_feature (61)..(61): /note="Nucleotide may be methylated to form 5-methylcytosine"
ttcttcttccttgaattatgactaagaggaattttttccccatgaggttctttcactgctcgtgacttaggtaagaaagtggtcatcatctacgtgcatccttgaagaacatgggtgtgggt

SEQ ID NO: 26082 - DNA, 122 bp, Homo sapiens
  misc_feature (61)..(62): /note="This region represents a CpG dinucleotide"
  misc_feature (61)..(61): /note="Nucleotide may be methylated to form 5-methylcytosine"
attacctggcccaaaatgtcattagctaccaggctgagaaacctgccctcctaggccgggcgctgtggctcacgcccgtaatctcagcatattgggaggccgaggtgggcggatcctgaggt

SEQ ID NO: 26083 - DNA, 122 bp, Homo sapiens
  misc_feature (61)..(62): /note="This region represents a CpG dinucleotide"
  misc_feature (61)..(61): /note="Nucleotide may be methylated to form 5-methylcytosine"
attcaagtgcctgattaggaatttgaataatctagttctaactagaaaagtcaagaaaaacggaaggtattagtcattgactgatagaatatctgagctggatagaatcctagaccatattg

SEQ ID NO: 26084 - DNA, 122 bp, Homo sapiens
  misc_feature (61)..(62): /note="This region represents a CpG dinucleotide"
  misc_feature (61)..(61): /note="Nucleotide may be methylated to form 5-methylcytosine"
ggcagcaatgggcatagctgggtgttccatttagcagcctcaccagaatcactggattctcgtggaggaggaagagcgctccaagggaagaggggaggggacagaagagaggggaaagggtg

SEQ ID NO: 26085 - DNA, 122 bp, Homo sapiens
  misc_feature (61)..(62): /note="This region represents a CpG dinucleotide"
  misc_feature (61)..(61): /note="Nucleotide may be methylated to form 5-methylcytosine"
attgctagctaatgtgtctgctcagattcacaggagtgctcaagctggtcacagtggtgacgcaatggcttttggtgaataatttcaggctccctgggagggcattgcatgacctcacatgc

SEQ ID NO: 26086 - DNA, 122 bp, Homo sapiens
  misc_feature (61)..(62): /note="This region represents a CpG dinucleotide"
  misc_feature (61)..(61): /note="Nucleotide may be methylated to form 5-methylcytosine"
acacttttaatagaccccagagctgtggtgacagcatgcccttcccagtttttccacagacggtgctcctgaaattttccatagacagtgtattcttgtggttaattagttatctgagcaat

SEQ ID NO: 26087 - DNA, 122 bp, Homo sapiens
  misc_feature (61)..(62): /note="This region represents a CpG dinucleotide"
  misc_feature (61)..(61): /note="Nucleotide may be methylated to form 5-methylcytosine"
ctcaaatgatccgcccgcctcggcctcccaaagtgctgggattacaggcgtgagccaccgcgcccggcccgatttgcgttttaaagtcgctctgaacaataaaatccggaaggactggaggg

SEQ ID NO: 26088 - DNA, 122 bp, Homo sapiens
  misc_feature (61)..(62): /note="This region represents a CpG dinucleotide"
  misc_feature (61)..(61): /note="Nucleotide may be methylated to form 5-methylcytosine"
tgttttcttcactcattctctaaaattaataagtgtcctttgagcacctgctctgactggcgctgtgtcaggaagtgagaggcacagagtaggatccggtcttcaggagaacgctgacttct

SEQ ID NO: 26089 - DNA, 122 bp, Homo sapiens
  misc_feature (61)..(62): /note="This region represents a CpG dinucleotide"
  misc_feature (61)..(61): /note="Nucleotide may be methylated to form 5-methylcytosine"
agttttgcttctacgcaacagacttttgttaatgaactaaaagtggctcaaggatgtcaacgtaccatgtctcctgagaaaggtgcatatgaggaattgaagttcctccccctggacctgac

SEQ ID NO: 26090 - DNA, 122 bp, Homo sapiens
  misc_feature (61)..(62): /note="This region represents a CpG dinucleotide"
  misc_feature (61)..(61): /note="Nucleotide may be methylated to form 5-methylcytosine"
atcttgagtaagagaaaggacaacagtgcttccatatcacactttacaggtgggtgtgaccgtgaccacagctctgcctattttgtggccctaacctcaccctgctgaggttcttgtttaca

SEQ ID NO: 26091 - DNA, 122 bp, Homo sapiens
  misc_feature (61)..(62): /note="This region represents a CpG dinucleotide"
  misc_feature (61)..(61): /note="Nucleotide may be methylated to form 5-methylcytosine"
gcctcactgcctccagccctctcaagttaaacgaactgaactaggcctggtggaaggaggcgcactttcctcctggcagaatgctagctctgagccagttcagtacctggaggaggagcagg

SEQ ID NO: 26092 - DNA, 122 bp, Homo sapiens
  misc_feature (61)..(62): /note="This region represents a CpG dinucleotide"
  misc_feature (61)..(61): /note="Nucleotide may be methylated to form 5-methylcytosine"
gagccaccgtgctcagccgcaaaattctttatgaattttacacttggcaaatgttaatgacggaagccatagtctgctcctaatacatgtccaaagcattgactgttgtgtcattagctgcc

SEQ ID NO: 26093 - DNA, 122 bp, Homo sapiens
  misc_feature (61)..(62): /note="This region represents a CpG dinucleotide"
  misc_feature (61)..(61): /note="Nucleotide may be methylated to form 5-methylcytosine"
gagtcaggtgggaggcaggagaggtaggtcatcgagtccaaggctctgagcacccacattcgtcaggtggctctggtgtcagtctctcaggactaatctcctgatagacaacaaataaacat

SEQ ID NO: 26094 - DNA, 122 bp, Homo sapiens
  misc_feature (61)..(62): /note="This region represents a CpG dinucleotide"
  misc_feature (61)..(61): /note="Nucleotide may be methylated to form 5-methylcytosine"
ttaaaggagattaaaattcttttctattactgggtatctcaaataaagatattcctgtaccgtaaagggttatggtttaaaaaaaaaaaactcagacacacttaaagtaacacatttcaaac

SEQ ID NO: 26095 - DNA, 122 bp, Homo sapiens
  misc_feature (61)..(62): /note="This region represents a CpG dinucleotide"
  misc_feature (61)..(61): /note="Nucleotide may be methylated to form 5-methylcytosine"
tcccaagtatgtctgattcagagcctgtgcaatttcctagcaggtcaaaataatgaaggacgcattgccagggtctcctgttccagtgtagcctgcttccttgaggtccctgtacatctcat

SEQ ID NO: 26096 - DNA, 122 bp, Homo sapiens
  misc_feature (61)..(62): /note="This region represents a CpG dinucleotide"
  misc_feature (61)..(61): /note="Nucleotide may be methylated to form 5-methylcytosine"
gggccccttttccccaggacctacagcccctcgggccagccccacccgaggcactccacccgcctccctgctggtcatctgggctcctggcccacagcttctggagaccagaggtgtgggca

SEQ ID NO: 26097 - DNA, 122 bp, Homo sapiens
  misc_feature (61)..(62): /note="This region represents a CpG dinucleotide"
  misc_feature (61)..(61): /note="Nucleotide may be methylated to form 5-methylcytosine"
atattatcacaaggaggtagttaagagatggctagattgttgcaaccctagatggtgacacggttaagttaatgttttgtagaaggaagggaaagaaataaacacttaagtgtttactctgt

SEQ ID NO: 26098 - DNA, 122 bp, Homo sapiens
  misc_feature (61)..(62): /note="This region represents a CpG dinucleotide"
  misc_feature (61)..(61): /note="Nucleotide may be methylated to form 5-methylcytosine"
catgcactcctgtgtgctcagatggtggagtgggcagggcttgtcatatgacaaacccatcgctacctgtgaaaattactactatgcagatgttctccacccccaccctctgacagcctgca

SEQ ID NO: 26099 - DNA, 122 bp, Homo sapiens
  misc_feature (61)..(62): /note="This region represents a CpG dinucleotide"
  misc_feature (61)..(61): /note="Nucleotide may be methylated to form 5-methylcytosine"
tattttgtaaaactgacatcctaacactggcacctagaatacttttccatctgagtctaacgtaccccactgcctctaatacggcccgcactacgatgagctacttcagtgggtgggaccaa

SEQ ID NO: 26100 - DNA, 122 bp, Homo sapiens
  misc_feature (61)..(62): /note="This region represents a CpG dinucleotide"
  misc_feature (61)..(61): /note="Nucleotide may be methylated to form 5-methylcytosine"
actagctgtgaccttgagcacattcactttcctgaacttcaagttttctcatctgtgagtcgcggttaataatacttacacagtggccctaaaaaatcagagaggaaaaaaaagtctatgca

SEQ ID NO: 26101 - DNA, 122 bp, Homo sapiens
  misc_feature (61)..(62): /note="This region represents a CpG dinucleotide"
  misc_feature (61)..(61): /note="Nucleotide may be methylated to form 5-methylcytosine"
gtggttcgagtggctgcaaggaaagcattttcaaccagcagcggaggctgcagtcattcacgagcatcaggaaatcaggggagcctcggagaggctgtgggtgatggatgggaacaagttga

SEQ ID NO: 26102 - DNA, 122 bp, Homo sapiens
  misc_feature (61)..(62): /note="This region represents a CpG dinucleotide"
  misc_feature (61)..(61): /note="Nucleotide may be methylated to form 5-methylcytosine"
gaaagaagctaatgaatcagccttcaaagtgagcaaacacatgagccattcaattaatcacgcatgagtcttcaaatccatgtccacatcaggctttgtctctcactagttggggaaacttg

SEQ ID NO: 26103 - DNA, 122 bp, Homo sapiens
  misc_feature (61)..(62): /note="This region represents a CpG dinucleotide"
  misc_feature (61)..(61): /note="Nucleotide may be methylated to form 5-methylcytosine"
ttcaatatcctcccagtcagggaggaaagcgttgactttaaacaattacaggctaacaaacgcaagtgctaaatatgtttttgagagtatggaaaaggctactcccagacaccgcccagttg

SEQ ID NO: 26104 - DNA, 122 bp, Homo sapiens
  misc_feature (61)..(62): /note="This region represents a CpG dinucleotide"
  misc_feature (61)..(61): /note="Nucleotide may be methylated to form 5-methylcytosine"
tgggtctatgcttccatagagcagtggcttcgggcacaggcctgagacccagcctgcctgcgggctgctagctgccagctacctctgcactaggaaggtttttaaacagctgaatgcaagct

SEQ ID NO: 26105 - DNA, 122 bp, Homo sapiens
  misc_feature (61)..(62): /note="This region represents a CpG dinucleotide"
  misc_feature (61)..(61): /note="Nucleotide may be methylated to form 5-methylcytosine"
attcaaagcttctgggtttaaggaaggattctgtagcctaaacccatgacaaatgagaggcggcaatgactcgtgagtagctaagactggattgatctctgttgttttgaatattggactta

SEQ ID NO: 26106 - DNA, 122 bp, Homo sapiens
  misc_feature (61)..(62): /note="This region represents a CpG dinucleotide"
  misc_feature (61)..(61): /note="Nucleotide may be methylated to form 5-methylcytosine"
agtctcctttctcaccctaatccctataatgtgaggtgtgctagttacttctaggggcatcggagactgtgaaggagagccaggagggagggttgggggtctcctcaggagttgtgagcctt

SEQ ID NO: 26107 - DNA, 122 bp, Homo sapiens
  misc_feature (61)..(62): /note="This region represents a CpG dinucleotide"
  misc_feature (61)..(61): /note="Nucleotide may be methylated to form 5-methylcytosine"
gactgaggcagagaccagctctgtcctttaccagctggtgacctcagctaagtcatttaacgcactcaacctttagtttttcatctgcagaatggatataatggaaactaaacccacaggat

SEQ ID NO: 26108 - DNA, 122 bp, Homo sapiens
  misc_feature (61)..(62): /note="This region represents a CpG dinucleotide"
  misc_feature (61)..(61): /note="Nucleotide may be methylated to form 5-methylcytosine"
tggacatggagaggaaaaaagaaatgaaaccaggaaggaaccgccaagaagcacacaacgcgtttatgctgccttaaccacacgcttgactctaaatgggtttaaaaattcttacttgtgtt

SEQ ID NO: 26109 - DNA, 122 bp, Homo sapiens
  misc_feature (61)..(62): /note="This region represents a CpG dinucleotide"
  misc_feature (61)..(61): /note="Nucleotide may be methylated to form 5-methylcytosine"
tacagtgtataaccttatgggacctcatgtggactcatcactgactgaaacattgttatgcggtgtgggactgtatttggctaaactagtaaggtatgctaatcatcccttatatttcctct

SEQ ID NO: 26110 - DNA, 122 bp, Homo sapiens
  misc_feature (61)..(62): /note="This region represents a CpG dinucleotide"
  misc_feature (61)..(61): /note="Nucleotide may be methylated to form 5-methylcytosine"
ggcgctgggcctcacgcccaggaggaagacaggtgaggcctgactgtccccttccctccccggatcggggatgggcacgcacgcatgcacacacatgttcacacctttccgtggtgaaaaga

SEQ ID NO: 26111 - DNA, 122 bp, Homo sapiens
  misc_feature (61)..(62): /note="This region represents a CpG dinucleotide"
  misc_feature (61)..(61): /note="Nucleotide may be methylated to form 5-methylcytosine"
cccacgactataaatctcatatgtaaacatgatttactattactgctactaaacttgttccgtctttacttgccccctcccacccaccaccccccttaaatataaaattggaaacatttcct

SEQ ID NO: 26112 - DNA, 122 bp, Homo sapiens
  misc_feature (61)..(62): /note="This region represents a CpG dinucleotide"
  misc_feature (61)..(61): /note="Nucleotide may be methylated to form 5-methylcytosine"
cttaactcacatggcaactctgagttctttgactgtgttttcgcttcatgcataagacagcggggacagcaaggttaggtaactaggccaaagtcacaagacttgtacatgacagatttaga

SEQ ID NO: 26113 - DNA, 122 bp, Homo sapiens
  misc_feature (61)..(62): /note="This region represents a CpG dinucleotide"
  misc_feature (61)..(61): /note="Nucleotide may be methylated to form 5-methylcytosine"
gcagaatgagaatgctaaatttctcttgttcttacatcctgtatttgcacagcactttcacgttatcacgtgtgacagaaggaagacagcctcagcctcccggctcagccactgggtctagt

SEQ ID NO: 26114 - DNA, 122 bp, Homo sapiens
  misc_feature (61)..(62): /note="This region represents a CpG dinucleotide"
  misc_feature (61)..(61): /note="Nucleotide may be methylated to form 5-methylcytosine"
ctcacaaagctcaggacaaaggcctcctcccccatgaagctttgcccaagctagaatgaccgtcaccctcctaagtgttgccacagggcattatgcttccattcggctcacattacaagtat

SEQ ID NO: 26115 - DNA, 122 bp, Homo sapiens
  misc_feature (61)..(62): /note="This region represents a CpG dinucleotide"
  misc_feature (61)..(61): /note="Nucleotide may be methylated to form 5-methylcytosine"
acagttgatagtgtcctgttctcctgttgtgtacactgccgaggtactaagcgttagtgtcgtgttaggacacatattgcttttcatccacagttcctggctcgtaactcccatagcccttg

SEQ ID NO: 26116 - DNA, 122 bp, Homo sapiens
  misc_feature (61)..(62): /note="This region represents a CpG dinucleotide"
  misc_feature (61)..(61): /note="Nucleotide may be methylated to form 5-methylcytosine"
gtacatgggtgtggatccacttatacgtgggtttggtctgcctgggagctattcctggtgcgtgattatcaagctaatagccattaaaaatctactaatcagctccatcccagaacttgctt

SEQ ID NO: 26117 - DNA, 122 bp, Homo sapiens
  misc_feature (61)..(62): /note="This region represents a CpG dinucleotide"
  misc_feature (61)..(61): /note="Nucleotide may be methylated to form 5-methylcytosine"
gcaaccgcatacctctgatttccttcttagaatctttgtgatgttgtcgatacaggtgcacgccttcagtatgcacaacatgattcatagagtgtataacatcacaggaggtttaacaaaca

SEQ ID NO: 26118 - DNA, 122 bp, Homo sapiens
  misc_feature (61)..(62): /note="This region represents a CpG dinucleotide"
  misc_feature (61)..(61): /note="Nucleotide may be methylated to form 5-methylcytosine"
tttcacaaaaactgtagcagccttctgagttaagcatttgctcagctggtctttgccagacgacagatgctttgtgtcattgcctgttgacagtggccttagtcacacattgtacctcaaag

SEQ ID NO: 26119 - DNA, 122 bp, Homo sapiens
  misc_feature (61)..(62): /note="This region represents a CpG dinucleotide"
  misc_feature (61)..(61): /note="Nucleotide may be methylated to form 5-methylcytosine"
ttattaaatttaaacttctcagcacatttaacattcatagaatgtggcatccattgctgtcgcagataattaatgtccagttttatgattatgaaataatttacagctaaatagaaatacct

SEQ ID NO: 26120 - DNA, 122 bp, Homo sapiens
  misc_feature (61)..(62): /note="This region represents a CpG dinucleotide"
  misc_feature (61)..(61): /note="Nucleotide may be methylated to form 5-methylcytosine"
tcattgtccagtctcactctggttaactgggcaatacctggttctaaagcttgtatgtcacgaggtattctaggaagcatgactccaacgagcacttgcattcttgatgatggtataaagaa

SEQ ID NO: 26121 - DNA, 122 bp, Homo sapiens
  misc_feature (61)..(62): /note="This region represents a CpG dinucleotide"
  misc_feature (61)..(61): /note="Nucleotide may be methylated to form 5-methylcytosine"
atgtacctgcctcagccacccaaagtgctaggattacaggcatgagccacagtgaccagccgggactggaatttgaacttaggcttgatgactaacttttgcatttgcttttctcactggct

SEQ ID NO: 26122 - DNA, 122 bp, Homo sapiens
  misc_feature (61)..(62): /note="This region represents a CpG dinucleotide"
  misc_feature (61)..(61): /note="Nucleotide may be methylated to form 5-methylcytosine"
ttcactcaactaatttggaacagtgatcttgacactagaaaatgctcttatcctgctctgcggcctgggttgctccgcctgtgggtggacccgctcagctgaagcaaaaaattatccacaca

SEQ ID NO: 26123 - DNA, 122 bp, Homo sapiens
  misc_feature (61)..(62): /note="This region represents a CpG dinucleotide"
  misc_feature (61)..(61): /note="Nucleotide may be methylated to form 5-methylcytosine"
tttaacacgttaaagttttcttttcctattcccttaaaaaattgagttctgctgtgtcaacgtggctaagtctgccctaggctactcttgatgatggaatttatagaataaacagcaaagat

SEQ ID NO: 26124 - DNA, 122 bp, Homo sapiens
  misc_feature (61)..(62): /note="This region represents a CpG dinucleotide"
  misc_feature (61)..(61): /note="Nucleotide may be methylated to form 5-methylcytosine"
tttccactagaactgggaggcagcagtgcacagtgtagctgattgtactgcggcctgccccgagggccctgtcttatgctccacctcggaggccagcaggaatttcagtatttctgtgaaaa

SEQ ID NO: 26125 - DNA, 122 bp, Homo sapiens
  misc_feature (61)..(62): /note="This region represents a CpG dinucleotide"
  misc_feature (61)..(61): /note="Nucleotide may be methylated to form 5-methylcytosine"
aaaggctggaaccttacctcttcctgtctggcatcacatgcactgtctcattctattgtgcggagacgtgagccaggtctgaattcaaatctatgaccctgccacttcctgtggggtgcata

SEQ ID NO: 26126 - DNA, 122 bp, Homo sapiens
  misc_feature (61)..(62): /note="This region represents a CpG dinucleotide"
  misc_feature (61)..(61): /note="Nucleotide may be methylated to form 5-methylcytosine"
aaaatattttctacatacaataatgtttgatccccataaaatgtgtgagataaagccaaacgtttccttctcagatggagaaactgagacttgatgtcaactgacttagccaactttgccta

SEQ ID NO: 26127 - DNA, 122 bp, Homo sapiens
  misc_feature (61)..(62): /note="This region represents a CpG dinucleotide"
  misc_feature (61)..(61): /note="Nucleotide may be methylated to form 5-methylcytosine"
gcagaaacccctgcgccctgacacacaacacaaaccaaaccaaacagggaagtggtcatgcgctttctcgtagccatgacgcgcccagccccagagctgttaaagacgcagcgttggtgcag

SEQ ID NO: 26128 - DNA, 122 bp, Homo sapiens
  misc_feature (61)..(62): /note="This region represents a CpG dinucleotide"
  misc_feature (61)..(61): /note="Nucleotide may be methylated to form 5-methylcytosine"
ccttttagttgttttcttgcttctgaagcagccagcatccttacacattttttcattactcgttattgtcctcaaaaattgctcttcaagcaaaatgtggtttcctgtatttcctgtgtcat

SEQ ID NO: 26129 - DNA, 122 bp, Homo sapiens
  misc_feature (61)..(62): /note="This region represents a CpG dinucleotide"
  misc_feature (61)..(61): /note="Nucleotide may be methylated to form 5-methylcytosine"
ctgtattgagatctggcctttaaaaatacctacatctcaacatctctgcctttacacctacgatctccagagcactggcgagcctccagacaaactcaggaggaaagaaagatgagccacat

SEQ ID NO: 26130 - DNA, 122 bp, Homo sapiens
  misc_feature (61)..(62): /note="This region represents a CpG dinucleotide"
  misc_feature (61)..(61): /note="Nucleotide may be methylated to form 5-methylcytosine"
gggtggccctgtaggcctttctagggatttacagttctgcagacttaaagctgctagggacgggaaaagtgtcagttgacagcaaaatcacaggtggcaaattttgtgcaatactcatactc

SEQ ID NO: 26131 - DNA, 122 bp, Homo sapiens
  misc_feature (61)..(62): /note="This region represents a CpG dinucleotide"
  misc_feature (61)..(61): /note="Nucleotide may be methylated to form 5-methylcytosine"
gcggagggtaacggatgtagggaggcatttagtagggcttgttctctaaccacctctctccgagagtttcaaagggagtgggatctggggaaggttgaggcctcaggcctgggaactaggaa

SEQ ID NO: 26132 - DNA, 122 bp, Homo sapiens
  misc_feature (61)..(62): /note="This region represents a CpG dinucleotide"
  misc_feature (61)..(61): /note="Nucleotide may be methylated to form 5-methylcytosine"
tgtttgttttttagcacactttggagtcctaaaatgacaacctcaggtgctgaaacagagcgtagagagaaagaacgccaggactggtgactttcctcttctcttagcaactcgcctgtcca

SEQ ID NO: 26133 - DNA, 122 bp, Homo sapiens
  misc_feature (61)..(62): /note="This region represents a CpG dinucleotide"
  misc_feature (61)..(61): /note="Nucleotide may be methylated to form 5-methylcytosine"
tacatctataaactggtatccgttttcatacattggtcttataagtttggattctatgagcgcacccacagagatgaatgtgctatttgctgatgaaatcagtttctaagcctgcaatgctg

SEQ ID NO: 26134 - DNA, 122 bp, Homo sapiens
  misc_feature (61)..(62): /note="This region represents a CpG dinucleotide"
  misc_feature (61)..(61): /note="Nucleotide may be methylated to form 5-methylcytosine"
tggcttgcgaacttccaacgcaggaattggaggattaccggggaaggaatgcgaggtacccgatagcctcacacctgaacacggtcgcttcaatccactgggattcatttaaaaaaaaaaaa

SEQ ID NO: 26135 - DNA, 122 bp, Homo sapiens
  misc_feature (61)..(62): /note="This region represents a CpG dinucleotide"
  misc_feature (61)..(61): /note="Nucleotide may be methylated to form 5-methylcytosine"
cggctcttccaaaaaacctggcgttccctgttacccgctagctctttctaggcgggtgggcggggtggagggggccctctgccagcgtccctcaattcgcacattttcagaaaggccccaga

SEQ ID NO: 26136 - DNA, 122 bp, Homo sapiens
  misc_feature (61)..(62): /note="This region represents a CpG dinucleotide"
  misc_feature (61)..(61): /note="Nucleotide may be methylated to form 5-methylcytosine"
tgtcagaggctgtctgaccacgcgtgaggctcgttgatggtgataggtttctatgtgtgacgctaaaacgccaggaaagaaaaggatagaaactgctaaacatgagtggaaatgagtgaaat

SEQ ID NO: 26137 - DNA, 122 bp, Homo sapiens
  misc_feature (61)..(62): /note="This region represents a CpG dinucleotide"
  misc_feature (61)..(61): /note="Nucleotide may be methylated to form 5-methylcytosine"
atgccctgttgctacatcaacatgatggtaaatgcttcttacaaaacctgtagcttccttcgcatgcatcctgtaactcctgctgacttactgaatttgtgagtcagcataatggtcaagaa

SEQ ID NO: 26138 - DNA, 122 bp, Homo sapiens
  misc_feature (61)..(62): /note="This region represents a CpG dinucleotide"
  misc_feature (61)..(61): /note="Nucleotide may be methylated to form 5-methylcytosine"
gcatctgttcttccaaactttatttctgtgtacacaaaaatattagttgagtatttattacgtgccaagaactcttcaaaagtattccagttgcaggcattaataagataggcagatttcct

SEQ ID NO: 26139 - DNA, 122 bp, Homo sapiens
  misc_feature (61)..(62): /note="This region represents a CpG dinucleotide"
  misc_feature (61)..(61): /note="Nucleotide may be methylated to form 5-methylcytosine"
aaacacccccctggccaggtgatggagttaaagatgaccttgctcgttgaccgccaaggtcggaagagagctggcggcctcaggtgtaggttccacctgacgccctggctgcaatcatagtc

SEQ ID NO: 26140 - DNA, 122 bp, Homo sapiens
  misc_feature (61)..(62): /note="This region represents a CpG dinucleotide"
  misc_feature (61)..(61): /note="Nucleotide may be methylated to form 5-methylcytosine"
cagtctctagagttaagccaggctttggctgacatgaaggaaatggactataggcagtggcgaaagatagctactgaggacctgaagcaaggaggctctctccaggtagagctgacatctcc

SEQ ID NO: 26141 - DNA, 122 bp, Homo sapiens
  misc_feature (61)..(62): /note="This region represents a CpG dinucleotide"
  misc_feature (61)..(61): /note="Nucleotide may be methylated to form 5-methylcytosine"
gagttttacctcccagttgtctatcaccaaagctgtccaccttgtccggaggggaatgagcgtggaaacccctggcggctgtactgacaaaagcaaccttagtcaatgacagagctgggcag

SEQ ID NO: 26142 - DNA, 122 bp, Homo sapiens
  misc_feature (61)..(62): /note="This region represents a CpG dinucleotide"
  misc_feature (61)..(61): /note="Nucleotide may be methylated to form 5-methylcytosine"
gatgacaccaccaactgtaattactctccatgtgtgaaacggtggccgaggacactgaagcgtgacaagtggccagtctttcccacactgccgacattggaagattgctctttgatttatgt

SEQ ID NO: 26143 - DNA, 122 bp, Homo sapiens
  misc_feature (61)..(62): /note="This region represents a CpG dinucleotide"
  misc_feature (61)..(61): /note="Nucleotide may be methylated to form 5-methylcytosine"
ccacttgcatctagttccaaaacatttggatcatacccaaaggaaaccccatgtccattacgcaattgcttccaacttcccccggcagcccctggcaaccaccaatctactttctgagtttg

SEQ ID NO: 26144 - DNA, 122 bp, Homo sapiens
  misc_feature (61)..(62): /note="This region represents a CpG dinucleotide"
  misc_feature (61)..(61): /note="Nucleotide may be methylated to form 5-methylcytosine"
agcaaaggcttagctaagaaggggaagtaactcacataaggtcagacagcaagttaataacgaagtcagggcaagagcccaggtctcctgacacctggtctagtatttttctgatgtcctaa

SEQ ID NO: 26145 - DNA, 122 bp, Homo sapiens
  misc_feature (61)..(62): /note="This region represents a CpG dinucleotide"
  misc_feature (61)..(61): /note="Nucleotide may be methylated to form 5-methylcytosine"
caattttcataaaagacacagtatctgagatggctgttaaacatgtcaagagattgtgtacgaggggaataaatcaaggaagactctataggttggtctgattctgtgatattaccagaatt

SEQ ID NO: 26146 - DNA, 122 bp, Homo sapiens
  misc_feature (61)..(62): /note="This region represents a CpG dinucleotide"
  misc_feature (61)..(61): /note="Nucleotide may be methylated to form 5-methylcytosine"
tagtcaatgttttcttaacaaccctaactgcacctgaaaacaagtaaacattaaaaactgcgttttggagggttttttttttttttttttacacaccaggaagtctagacacctgcctttgt

SEQ ID NO: 26147 - DNA, 122 bp, Homo sapiens
  misc_feature (61)..(62): /note="This region represents a CpG dinucleotide"
  misc_feature (61)..(61): /note="Nucleotide may be methylated to form 5-methylcytosine"
ctgagagaacagcccagctccttagtggctctggtgtattgatcccgtgctgtgggcgggcgtgggtctgcggcttcctgtctgagggaatgcagtgccacggacagacttgatttgtttaa

SEQ ID NO: 26148 - DNA, 122 bp, Homo sapiens
  misc_feature (61)..(62): /note="This region represents a CpG dinucleotide"
  misc_feature (61)..(61): /note="Nucleotide may be methylated to form 5-methylcytosine"
cccacggtgcggtgagcccatgtgactagaccccggacgatggactaagagggaagaggacgtgcctaagttccgggctgaggccttaagaacccatgcactcttctcctgttacttttccc

SEQ ID NO: 26149 - DNA, 122 bp, Homo sapiens
  misc_feature (61)..(62): /note="This region represents a CpG dinucleotide"
  misc_feature (61)..(61): /note="Nucleotide may be methylated to form 5-methylcytosine"
cacttttaagtaccattgagcaatacttttattccctaaatgtaaagctttgcatgagaacgtgtctaatattagctggtagaccagattactcgggagtctcttctggtctcctaagtaaa

SEQ ID NO: 26150 - DNA, 122 bp, Homo sapiens
  misc_feature (61)..(62): /note="This region represents a CpG dinucleotide"
  misc_feature (61)..(61): /note="Nucleotide may be methylated to form 5-methylcytosine"
atcaaaagcagagactctctttaaccagtacagcctcttttccagagaatgccaaggagacgctaacccagtttggtcctgagctggtttccatctccatgattcatgccataaatgtcatc

SEQ ID NO: 26151 - DNA, 122 bp, Homo sapiens
  misc_feature (61)..(62): /note="This region represents a CpG dinucleotide"
  misc_feature (61)..(61): /note="Nucleotide may be methylated to form 5-methylcytosine"
gggacgtgggctctgtcaacttcttcttttgggagcatcgagtgctctctgaaatgcactcgcctctccctaagagcggaagtgggctgggtgtgggggctcacacctgtaatcccagcact

SEQ ID NO: 26152 - DNA, 122 bp, Homo sapiens
  misc_feature (61)..(62): /note="This region represents a CpG dinucleotide"
  misc_feature (61)..(61): /note="Nucleotide may be methylated to form 5-methylcytosine"
ccaagttcataaccctgctgctgacagtgtcaacatccacctcctgctgagtgcctgctacgcaaccagtaccacccaagggctttccttccactttcatttaccccttcaggaaatcccat

SEQ ID NO: 26153 - DNA, 122 bp, Homo sapiens
  misc_feature (61)..(62): /note="This region represents a CpG dinucleotide"
  misc_feature (61)..(61): /note="Nucleotide may be methylated to form 5-methylcytosine"
gttaccacagcttcaagtagctgttacagaacaagcaagacatcctaataaagctgtaaacgtgtttactcaaacagagtattgattttacttggaggggaagaagccggttcttagcacag

SEQ ID NO: 26154 - DNA, 122 bp, Homo sapiens
  misc_feature (61)..(62): /note="This region represents a CpG dinucleotide"
  misc_feature (61)..(61): /note="Nucleotide may be methylated to form 5-methylcytosine"
ctgcctgctccaggctgcttctcagcacaagacaaagagcatttgagctggtctcctctccgcccatgctctgattgccgcctttcagcttggcctagcacaaggaagttcatctggctcta

SEQ ID NO: 26155 - DNA, 122 bp, Homo sapiens
  misc_feature (61)..(62): /note="This region represents a CpG dinucleotide"
  misc_feature (61)..(61): /note="Nucleotide may be methylated to form 5-methylcytosine"
tgcctgtctccatcccaccttggacatgaatcattctgccctgtgtctccacactgtagacgctgcccgtcattgagtcactttggagctgtctcagttaccggattaactgtcgtagtatc

SEQ ID NO: 26156 - DNA, 122 bp, Homo sapiens
  misc_feature (61)..(62): /note="This region represents a CpG dinucleotide"
  misc_feature (61)..(61): /note="Nucleotide may be methylated to form 5-methylcytosine"
agccctggtagagcactcactcgggggctccatcctgagccctggtgacctggatgaggccgtggaaactgcctgtcgactctcttagggctataaccccatccttctcttctgtatcagca

SEQ ID NO: 26157 - DNA, 122 bp, Homo sapiens
  misc_feature (61)..(62): /note="This region represents a CpG dinucleotide"
  misc_feature (61)..(61): /note="Nucleotide may be methylated to form 5-methylcytosine"
cctcagcagagagaagctgaagtgattactgcattcctatgagctgtgggaggaataaatcgtggaaagaaatcctcatttgcaactgtatggcattaggggtgaggggtctcggaagaagc

SEQ ID NO: 26158 - DNA, 122 bp, Homo sapiens
  misc_feature (61)..(62): /note="This region represents a CpG dinucleotide"
  misc_feature (61)..(61): /note="Nucleotide may be methylated to form 5-methylcytosine"
tcatccacctctaattgctgggtggacagcccagcaggtgatgtagcttcactgtttgttcggcagggggactgcagggacccatctctaatatgacccttgagccctgcggcaaggatctg

SEQ ID NO: 26159 - DNA, 122 bp, Homo sapiens
  misc_feature (61)..(62): /note="This region represents a CpG dinucleotide"
  misc_feature (61)..(61): /note="Nucleotide may be methylated to form 5-methylcytosine"
agacgaacagactgtagtccatcagtgcaatggacagattcgaccacgaaaaggaatgaacgtcagacacacgaagcagacaggatgtctgtgattgcatcacatgctgctcctgtgttgtt

SEQ ID NO: 26160 - DNA, 122 bp, Homo sapiens
  misc_feature (61)..(62): /note="This region represents a CpG dinucleotide"
  misc_feature (61)..(61): /note="Nucleotide may be methylated to form 5-methylcytosine"
ggattctataaagcacgtttgctgtttaacccaggaagacttgcctcagggattaggagacggaacactgcaaaactgttcccaaaactgcaccctaagtgtggttatttcacacccatggc

SEQ ID NO: 26161 - DNA, 122 bp, Homo sapiens
  misc_feature (61)..(62): /note="This region represents a CpG dinucleotide"
  misc_feature (61)..(61): /note="Nucleotide may be methylated to form 5-methylcytosine"
aaggcttctggtccagtgccctatgccccagatgagaggactgaggcccagaccaggaagcgaattgtctaagactcttccaaggtccccacccagtgagttagtggcaaagctggaaaggc

SEQ ID NO: 26162 - DNA, 122 bp, Homo sapiens
  misc_feature (61)..(62): /note="This region represents a CpG dinucleotide"
  misc_feature (61)..(61): /note="Nucleotide may be methylated to form 5-methylcytosine"
gaaaacctgaactccaggaagtagcaggggttcagaggaaagaacaggtactcacacaggcgtattatatcttcagggtaaacctttaacctggtgaggtttggtaggatcagagtgaattt

SEQ ID NO: 26163 - DNA, 122 bp, Homo sapiens
  misc_feature (61)..(62): /note="This region represents a CpG dinucleotide"
  misc_feature (61)..(61): /note="Nucleotide may be methylated to form 5-methylcytosine"
cctgctctgctgctgcctgtctctctgagtatgaaggctgggcctgatgggtccagagcacgcagcacagagggcttgtgcttagtagggattgacaaatgcttattcatcacttccttcaa

SEQ ID NO: 26164 - DNA, 122 bp, Homo sapiens
  misc_feature (61)..(62): /note="This region represents a CpG dinucleotide"
  misc_feature (61)..(61): /note="Nucleotide may be methylated to form 5-methylcytosine"
tttcaaagtcctctcaatttctccatttgcaatcatcaattttagccttgacattgtaagcgttttttaagactggatgatacaaacacctccgaccacattacaatgacttcagctatttt

SEQ ID NO: 26165 - DNA, 122 bp, Homo sapiens
  misc_feature (61)..(62): /note="This region represents a CpG dinucleotide"
  misc_feature (61)..(61): /note="Nucleotide may be methylated to form 5-methylcytosine"
agccagtactctgtcctcaggcatgggtgttggggacgtcttgtggccataccagccaggcgtggtggaagccgcagaggtggggccaggtgagaacacccagttgtgccttgctcatcctg

SEQ ID NO: 26166 - DNA, 122 bp, Homo sapiens
  misc_feature (61)..(62): /note="This region represents a CpG dinucleotide"
  misc_feature (61)..(61): /note="Nucleotide may be methylated to form 5-methylcytosine"
agaaaaaaataaaagaagaaaaagaaagaatatctttttccatttcttcatttgttcatgcgttcaacaaatacttatcctatagtccaggcactaagctaggagtggcctggtcactcagt

SEQ ID NO: 26167 - DNA, 122 bp, Homo sapiens
  misc_feature (61)..(62): /note="This region represents a CpG dinucleotide"
  misc_feature (61)..(61): /note="Nucleotide may be methylated to form 5-methylcytosine"
gtcaaactttcaggtggtgggggcggagttgccggaaaggctcatagaaataaaccttgacgctggaagcgttagagcgatttttttaaaggtggcataacgataagctcattgttctaatc

SEQ ID NO: 26168 - DNA, 122 bp, Homo sapiens
  misc_feature (61)..(62): /note="This region represents a CpG dinucleotide"
  misc_feature (61)..(61): /note="Nucleotide may be methylated to form 5-methylcytosine"
tgcttgtgcctacaagaatacatgctgtacgattccctttggatccagcacaagaaaaggcgtaactaatctacacccttcgaagccgggacagggaagagaaagaggaggcaggcaggaag

SEQ ID NO: 26169 - DNA, 122 bp, Homo sapiens
  misc_feature (61)..(62): /note="This region represents a CpG dinucleotide"
  misc_feature (61)..(61): /note="Nucleotide may be methylated to form 5-methylcytosine"
tctccaggtccctctaacatcatgagccagtggggcaccccctggcaacccctatatacacgctgggcaaccgtaagtatttagggagacagaggtgcctcttctgcagagtcacccatggc

SEQ ID NO: 26170 - DNA, 122 bp, Homo sapiens
  misc_feature (61)..(62): /note="This region represents a CpG dinucleotide"
  misc_feature (61)..(61): /note="Nucleotide may be methylated to form 5-methylcytosine"
catgtactaattacattgtggttatcttaaccacaaaggaagcgttctactccagagaaccgcgtggaaacagtgcagatggactagcacgatacctgagaggagctttaggataactccgg

SEQ ID NO: 26171 - DNA, 122 bp, Homo sapiens
  misc_feature (61)..(62): /note="This region represents a CpG dinucleotide"
  misc_feature (61)..(61): /note="Nucleotide may be methylated to form 5-methylcytosine"
ggactccggccatcaggggaacttgaggctatggggttttcagttgtcaatctagagtagcgaaaaaacaagcttgagggttacacgacccttgttatctgtgtcgtctcgttcaggcccaa

SEQ ID NO: 26172 - DNA, 122 bp, Homo sapiens
  misc_feature (61)..(62): /note="This region represents a CpG dinucleotide"
  misc_feature (61)..(61): /note="Nucleotide may be methylated to form 5-methylcytosine"
gccatggctagccagcctgggaagctggctaaatgctggtttttcttgtccagtgagtcccgtgtggcctcaagctcctgtgccaagggctgcagcatggactccagccgccgcagggctgt

SEQ ID NO: 26173 - DNA, 122 bp, Homo sapiens
  misc_feature (61)..(62): /note="This region represents a CpG dinucleotide"
  misc_feature (61)..(61): /note="Nucleotide may be methylated to form 5-methylcytosine"
acaaggaaacatcttcataacgctgtagttggaaggtgaagatgatgtattttgagctgacgtgtatgttgaagtgaatatgctcaacagcactctatgtggaaaccaaattaaatttaatt

SEQ ID NO: 26174 - DNA, 122 bp, Homo sapiens
  misc_feature (61)..(62): /note="This region represents a CpG dinucleotide"
  misc_feature (61)..(61): /note="Nucleotide may be methylated to form 5-methylcytosine"
cttctttccttggagggagagaacacaaacagctactctacaccagcattgtgtttgccacgaggacagacatacaagctgatggactggcgcctgccctccggggctgatattcagtcagg

SEQ ID NO: 26175 - DNA, 122 bp, Homo sapiens
  misc_feature (61)..(62): /note="This region represents a CpG dinucleotide"
  misc_feature (61)..(61): /note="Nucleotide may be methylated to form 5-methylcytosine"
aaccactgcattaatgcaaaccagaattaaaaccacatagtataaaatgtcatgcccacacgtctatttgtccagcaaatctcaaggcagccagcccgaacctgggcaccccagtggacttg

SEQ ID NO: 26176 - DNA, 122 bp, Homo sapiens
  misc_feature (61)..(62): /note="This region represents a CpG dinucleotide"
  misc_feature (61)..(61): /note="Nucleotide may be methylated to form 5-methylcytosine"
aggcggcgggaggggcggtcagctgctgctgtcactcttcccccctcggatcctgagtgacggctcggcctgccacctcctcagccgcctgctcggaagtacacagcttcccgtcagagcgc

SEQ ID NO: 26177 - DNA, 122 bp, Homo sapiens
  misc_feature (61)..(62): /note="This region represents a CpG dinucleotide"
  misc_feature (61)..(61): /note="Nucleotide may be methylated to form 5-methylcytosine"
tggtgctgctactattgggccagttagtttctcttaaagaccaggatgtttggtgtattacgcaggatttgttgagctgcatgtggcagaatattcaaaacaatagcagcttaaaaatacaa

SEQ ID NO: 26178 - DNA, 122 bp, Homo sapiens
  misc_feature (61)..(62): /note="This region represents a CpG dinucleotide"
  misc_feature (61)..(61): /note="Nucleotide may be methylated to form 5-methylcytosine"
ctggaggaggtgatcacagatgctgtggctgggctgccccatgctgtacgagtcagtgcccgggactttctagatgctggcacctggagcacctggagcccggaggcctggggaactccgag

SEQ ID NO: 26179 - DNA, 122 bp, Homo sapiens
  misc_feature (61)..(62): /note="This region represents a CpG dinucleotide"
  misc_feature (61)..(61): /note="Nucleotide may be methylated to form 5-methylcytosine"
ctcagagaaaggatgaacaggcaaacgattcccaacttcctagagactatctcaaagattcgctggattttagatttctttttaaaagcccagggggttagaaattagggaggttcaagaaa

SEQ ID NO: 26180 - DNA, 122 bp, Homo sapiens
  misc_feature (61)..(62): /note="This region represents a CpG dinucleotide"
  misc_feature (61)..(61): /note="Nucleotide may be methylated to form 5-methylcytosine"
ccgatccgaggggccccagtttgttcataaagcactcatggcaggttctgacatctctgccgcgtgcagcctggtccccggcaggcaccctctgagtttgtccctcactgctccccttcccc

SEQ ID NO: 26181 - DNA, 122 bp, Homo sapiens
  misc_feature (61)..(62): /note="This region represents a CpG dinucleotide"
  misc_feature (61)..(61): /note="Nucleotide may be methylated to form 5-methylcytosine"
gagcaaggagtgctacaatgactccttagtgttgtcacatcgtttactagacacatttctcgcttgggagcctgacttcctgtttacacagttcttatttgtatttttttgtttatagctcc

SEQ ID NO: 26182 - DNA, 122 bp, Homo sapiens
  misc_feature (61)..(62): /note="This region represents a CpG dinucleotide"
  misc_feature (61)..(61): /note="Nucleotide may be methylated to form 5-methylcytosine"
agggttagagctgggttccaatgctgcctcccttactgtagttctgcatcagttgtgtggcgtcgagcagattgcttcacttctctgggtctgttttctcattttgcaaatggggcaatact

SEQ ID NO: 26183 - DNA, 122 bp, Homo sapiens
  misc_feature (61)..(62): /note="This region represents a CpG dinucleotide"
  misc_feature (61)..(61): /note="Nucleotide may be methylated to form 5-methylcytosine"
caaattaccacttttttttttttttttttttttttttttttttgtcttttggaaacagtacggtagtcggagcaccaacaatgaagttcaacttacggctctgctgcttgcttccttgcttg

SEQ ID NO: 26184 - DNA, 122 bp, Homo sapiens
  misc_feature (61)..(62): /note="This region represents a CpG dinucleotide"
  misc_feature (61)..(61): /note="Nucleotide may be methylated to form 5-methylcytosine"
tttaattagaagtgcatgctgcttcagggagactccccactcctgactcaggaatgactgcgagtggaacccccgcctcagggaaaattactacatgggaaaatatgcttgggcctacatga

SEQ ID NO: 26185 - DNA, 122 bp, Homo sapiens
  misc_feature (61)..(62): /note="This region represents a CpG dinucleotide"
  misc_feature (61)..(61): /note="Nucleotide may be methylated to form 5-methylcytosine"
catctatcaaaattacaggcgcttagactctttgacctggcaatttcatttccaggaattcgttctatggatatccttgcacatgtaggaaatgttgtgtgcataagatcagttattacagc

SEQ ID NO: 26186 - DNA, 122 bp, Homo sapiens
  misc_feature (61)..(62): /note="This region represents a CpG dinucleotide"
  misc_feature (61)..(61): /note="Nucleotide may be methylated to form 5-methylcytosine"
tttggtgattccattggttagtcactattagtcacttgctgtttatgaagcgctgtgtgtcgtgaagggggagtggtccctgcattaagccatgacttacatcttactgcagatgctgttgt

SEQ ID NO: 26187 - DNA, 122 bp, Homo sapiens
  misc_feature (61)..(62): /note="This region represents a CpG dinucleotide"
  misc_feature (61)..(61): /note="Nucleotide may be methylated to form 5-methylcytosine"
tccatcggaaacctctcctcccaagcttgctttgaaatgggctgtgacatttggtcactgcgtagcaagtcctgtgagaatgagccgagtgcctgactttagaaagtgagtactttctaaag

SEQ ID NO: 26188 - DNA, 122 bp, Homo sapiens
  misc_feature (61)..(62): /note="This region represents a CpG dinucleotide"
  misc_feature (61)..(61): /note="Nucleotide may be methylated to form 5-methylcytosine"
agaatggagagcaatcctgggcaatattgttctgtgagaacctatggataaatgagcaaccgcaggaggaagaacaaactcccatgctaagaagagcctcaggaaagctcttgttactattt

SEQ ID NO: 26189 - DNA, 122 bp, Homo sapiens
  misc_feature (61)..(62): /note="This region represents a CpG dinucleotide"
  misc_feature (61)..(61): /note="Nucleotide may be methylated to form 5-methylcytosine"
aaccatgaaatttgtggtaactgtgacagcagcaataggaaattgatacaagtatgtatccgactattattatatgtgttaagtgttgttagagtagcgagaaacagacatcagctttagca

SEQ ID NO: 26190 - DNA, 122 bp, Homo sapiens
  misc_feature (61)..(62): /note="This region represents a CpG dinucleotide"
  misc_feature (61)..(61): /note="Nucleotide may be methylated to form 5-methylcytosine"
ggaaaaagcagttactgaatcaaaaatgccttgaggacgggagccagctttctcttctgccgccttccttagcacttaggacccaattctgcacagaacaggaggacataaataattctgtc

SEQ ID NO: 26191 - DNA, 122 bp, Homo sapiens
  misc_feature (61)..(62): /note="This region represents a CpG dinucleotide"
  misc_feature (61)..(61): /note="Nucleotide may be methylated to form 5-methylcytosine"
gtcacagccacagaaattacaggagttaagaaagtgcatcatctccttccttggagaacacggagggatggtgacttgcagtatggtctggttctcaagctcacagtgcacctcttttcctc

SEQ ID NO: 26192 - DNA, 122 bp, Homo sapiens
  misc_feature (61)..(62): /note="This region represents a CpG dinucleotide"
  misc_feature (61)..(61): /note="Nucleotide may be methylated to form 5-methylcytosine"
ttccccactccccatgggaacactggaaaatagaaaggacaaaggaaatggaagcaagtgcgctgggaaatgcccaagtttcagcttgaatgatgctgtttacatgttcttacaggaaagac

SEQ ID NO: 26193 - DNA, 122 bp, Homo sapiens
  misc_feature (61)..(62): /note="This region represents a CpG dinucleotide"
  misc_feature (61)..(61): /note="Nucleotide may be methylated to form 5-methylcytosine"
aaatcactgaatccaacaactttatttcaaaggcaggtaaactactgtccagacaggtgacgtgactcacccatgatgatggcctgggattagaagccaagtcttccattcctggccctgag

SEQ ID NO: 26194 - DNA, 122 bp, Homo sapiens
  misc_feature (61)..(62): /note="This region represents a CpG dinucleotide"
  misc_feature (61)..(61): /note="Nucleotide may be methylated to form 5-methylcytosine"
ctcctgaccagaaagttctttccattccatttctttccaggcttatctgaagcctgctggcgcatggcagttgtgcatcaaactgtccccaagctcaaggccagaggaagagcaggttggga

SEQ ID NO: 26195 - DNA, 122 bp, Homo sapiens
  misc_feature (61)..(62): /note="This region represents a CpG dinucleotide"
  misc_feature (61)..(61): /note="Nucleotide may be methylated to form 5-methylcytosine"
gattaatgccagtgatgcaagatgatttagcatacacaaatcaacaaatgcactacaccacgttacaagaaagagtgacagaaaccatgtgatattttaatagatgcagaaaataatttgac

SEQ ID NO: 26196 - DNA, 122 bp, Homo sapiens
  misc_feature (61)..(62): /note="This region represents a CpG dinucleotide"
  misc_feature (61)..(61): /note="Nucleotide may be methylated to form 5-methylcytosine"
aaaaccaagaggcagcagttgtttatcacgacctcaactcagtaaggcctgagattctttcgaaaaggagctttgcttcccatgacgcagagggaagtgtcaactgggatatttctggtaaa

SEQ ID NO: 26197 - DNA, 122 bp, Homo sapiens
  misc_feature (61)..(62): /note="This region represents a CpG dinucleotide"
  misc_feature (61)..(61): /note="Nucleotide may be methylated to form 5-methylcytosine"
acttgtggcacgcctaggacagtgcttggcattactcagtaagtgctcagtaaaccactgcgtgtgtgacatgtaagctgcacttgcttgaaaagggaccaaatgctcctggtgtcaacagg

SEQ ID NO: 26198 - DNA, 122 bp, Homo sapiens
  misc_feature (61)..(62): /note="This region represents a CpG dinucleotide"
  misc_feature (61)..(61): /note="Nucleotide may be methylated to form 5-methylcytosine"
gtgggtgtgggtggtagaggacaggcgagtcacctagctcctggataaactcagtgtgtgcgcagtggaaagcagtttgttgtgtttgcatatttgtgtcagagctttcatttaaagcaaca

SEQ ID NO: 26199 - DNA, 122 bp, Homo sapiens
  misc_feature (61)..(62): /note="This region represents a CpG dinucleotide"
  misc_feature (61)..(61): /note="Nucleotide may be methylated to form 5-methylcytosine"
caagaggccatttgtcaaacagcacaagacatgtaacaggatatgcacagtgagacatggcgggggagagcccccacggagcccaggggatgtatgacatcatagtcacagtcctacatctt

SEQ ID NO: 26200 - DNA, 122 bp, Homo sapiens
  misc_feature (61)..(62): /note="This region represents a CpG dinucleotide"
  misc_feature (61)..(61): /note="Nucleotide may be methylated to form 5-methylcytosine"
tcaggagcctgggagatgtttcaactttgaaaaggtgtctgttgagtcgggagttttctgcgctgcatttggattcgttgacactgctcctgctcttggatgagctgtctcttttacaggtt

SEQ ID NO: 26201 - DNA, 122 bp, Homo sapiens
  misc_feature (61)..(62): /note="This region represents a CpG dinucleotide"
  misc_feature (61)..(61): /note="Nucleotide may be methylated to form 5-methylcytosine"
tttagcaatcaattagcacagtccccaggctccgggcctgcacactcggcagaaagaatgcgtcctgctgcactgattagaaacagatgcgctggcaaacagagctggccgagcagggccgg

SEQ ID NO: 26202 - DNA, 122 bp, Homo sapiens
  misc_feature (61)..(62): /note="This region represents a CpG dinucleotide"
  misc_feature (61)..(61): /note="Nucleotide may be methylated to form 5-methylcytosine"
aaagttgtaaaaaaaaaaaaaaaaaaaaaaaaactagatattcttttctcttcatattatcgtcagtactttgggaaagagatttagcatataatatcaattagttttccgaatgtaattgc

SEQ ID NO: 26203 - DNA, 122 bp, Homo sapiens
  misc_feature (61)..(62): /note="This region represents a CpG dinucleotide"
  misc_feature (61)..(61): /note="Nucleotide may be methylated to form 5-methylcytosine"
cgacagacgcaccctcacaaacccacaggaaaaatgacggcacggacagaggccgtgaaccggtggctcagaaggaaaaagaaaacaagacacaggaagaccattcacctcacgcccgtctc

SEQ ID NO: 26204 - DNA, 122 bp, Homo sapiens
  misc_feature (61)..(62): /note="This region represents a CpG dinucleotide"
  misc_feature (61)..(61): /note="Nucleotide may be methylated to form 5-methylcytosine"
tgttgaaaagataacagatgtgttggggttattctgtttcagactttacccaagagaaagcgattggagaattgcctaatcctggtatcatgtttccggctatgacaggaagagatagatca

SEQ ID NO: 26205 - DNA, 122 bp, Homo sapiens
  misc_feature (61)..(62): /note="This region represents a CpG dinucleotide"
  misc_feature (61)..(61): /note="Nucleotide may be methylated to form 5-methylcytosine"
tgaattaatcttgtcattgacaggtaactttgaaatgcctacatttggtgcttagcagtgcgtgtgattctgaagtttaagaatgtctttggagtttctatcagttttttttttttcctctg

SEQ ID NO: 26206 - DNA, 122 bp, Homo sapiens
  misc_feature (61)..(62): /note="This region represents a CpG dinucleotide"
  misc_feature (61)..(61): /note="Nucleotide may be methylated to form 5-methylcytosine"
gaacctctgtgtgctatagaaactcttattgctaagaccataagtgaggtaagacctaaacgccccttctcaaaggaagccctctttctgttttgcccaacatgcctcggtattacaccaag

SEQ ID NO: 26207 - DNA, 122 bp, Homo sapiens
  misc_feature (61)..(62): /note="This region represents a CpG dinucleotide"
  misc_feature (61)..(61): /note="Nucleotide may be methylated to form 5-methylcytosine"
gtcccaagccctctccctggcaggctgaccaaggcctatgagaacaccatgtgtgtgcatcgtcccttttcagccttgaggcaggtgcagcagtacctccttctcacagctgagcacctgga

SEQ ID NO: 26208 - DNA, 122 bp, Homo sapiens
  misc_feature (61)..(62): /note="This region represents a CpG dinucleotide"
  misc_feature (61)..(61): /note="Nucleotide may be methylated to form 5-methylcytosine"
tgtcacaggaagagaaatatttagtcagtttttcccccacggctaaatttgcactgaacacgaagacctagttttccatgcacagaaggctggactctcatctggtgtcttacagaccccaa

SEQ ID NO: 26209 - DNA, 122 bp, Homo sapiens
  misc_feature (61)..(62): /note="This region represents a CpG dinucleotide"
  misc_feature (61)..(61): /note="Nucleotide may be methylated to form 5-methylcytosine"
aggggaggggcgcaagttccaggcaacggaagcagcacatacaaggaccctgtggtgcaacgtgcctggtgcctcttaggaaggccaaggcaccaggagggtgcagggtcccgagaggcctc

SEQ ID NO: 26210 - DNA, 122 bp, Homo sapiens
  misc_feature (61)..(62): /note="This region represents a CpG dinucleotide"
  misc_feature (61)..(61): /note="Nucleotide may be methylated to form 5-methylcytosine"
gcatggtatgttccaataaagctttataagaacaggggccctgggcccacagttccccaacgtaagattctaagagcccaaggttaagtaagctctagtccaccacactgcatgaggccaaa

SEQ ID NO: 26211 - DNA, 122 bp, Homo sapiens
  misc_feature (61)..(62): /note="This region represents a CpG dinucleotide"
  misc_feature (61)..(61): /note="Nucleotide may be methylated to form 5-methylcytosine"
ataagcttcctgagagcatgaataagcctttctgtcttattcatcattgtatcccctgttcggtacctagaacagtgcttggcatgttgcaggcactgaaatatttattgaatgaataaatg

SEQ ID NO: 26212 - DNA, 122 bp, Homo sapiens
  misc_feature (61)..(62): /note="This region represents a CpG dinucleotide"
  misc_feature (61)..(61): /note="Nucleotide may be methylated to form 5-methylcytosine"
actaatttgactaactttcccaccaaactgatttttaagctgcattgcataactgtgttacgtcatgtgggtgtgtctatgagctaacttttcacattgcattgtggtgatatttgaattga

SEQ ID NO: 26213 - DNA, 122 bp, Homo sapiens
  misc_feature (61)..(62): /note="This region represents a CpG dinucleotide"
  misc_feature (61)..(61): /note="Nucleotide may be methylated to form 5-methylcytosine"
ttgaaatgcaataacttacatgcaaaaaaaagctttacacatgaatctttttcagttttccgaacttccccatatgaattcctttctttatgattttctagaacagcaaaacacagtagtcc

SEQ ID NO: 26214 - DNA, 122 bp, Homo sapiens
  misc_feature (61)..(62): /note="This region represents a CpG dinucleotide"
  misc_feature (61)..(61): /note="Nucleotide may be methylated to form 5-methylcytosine"
ttgtctgagcttttgctgtctattttcttctctagcaacgtggacttgatcattcagcctcgtgcttttcatttctttgcagctgacttgcactactcgcgtccccttgtgctagccccatt

SEQ ID NO: 26215 - DNA, 122 bp, Homo sapiens
  misc_feature (61)..(62): /note="This region represents a CpG dinucleotide"
  misc_feature (61)..(61): /note="Nucleotide may be methylated to form 5-methylcytosine"
cagtggaatgtcctcgggcattctgtagccttcaattttaaagagtgggataagggactgcgtcaccagataatgtgagtaaagtgcttttagatcaccagatgaaaagcattttataaaat

SEQ ID NO: 26216 - DNA, 122 bp, Homo sapiens
  misc_feature (61)..(62): /note="This region represents a CpG dinucleotide"
  misc_feature (61)..(61): /note="Nucleotide may be methylated to form 5-methylcytosine"
ccatcaaaaggtcagtgcatgaactcattgtgtatattcatacaatggagtaccatgatacgccaataaaaatgagtcaactacagataagcagaatatagaagaatctcacaaacacaacg

SEQ ID NO: 26217 - DNA, 122 bp, Homo sapiens
  misc_feature (61)..(62): /note="This region represents a CpG dinucleotide"
  misc_feature (61)..(61): /note="Nucleotide may be methylated to form 5-methylcytosine"
atgagttctctaaaagctacaagttcctctttaagctaatttaatgacaaaatggggaaacgagagttggttggaatattaaagaccatcaggtctttgaagaatttatgccgtactaaaca

SEQ ID NO: 26218 - DNA, 122 bp, Homo sapiens
  misc_feature (61)..(62): /note="This region represents a CpG dinucleotide"
  misc_feature (61)..(61): /note="Nucleotide may be methylated to form 5-methylcytosine"
cagtaactttgctcggaatgaaaacccagaaggctgactcactgcattctaggtggtgagcgctcagccacagtcctcagctgctgtgcccagtcagtctgaggtcagcaactgatttaaag

SEQ ID NO: 26219 - DNA, 122 bp, Homo sapiens
  misc_feature (61)..(62): /note="This region represents a CpG dinucleotide"
  misc_feature (61)..(61): /note="Nucleotide may be methylated to form 5-methylcytosine"
atccagtctcacactgacataataggaatgttaaaaggatcttatagagaggaactggctcgtttcttggtgtactagtcagggttctccagagaattagaaccaataggatatagatagag

SEQ ID NO: 26220 - DNA, 122 bp, Homo sapiens
  misc_feature (61)..(62): /note="This region represents a CpG dinucleotide"
  misc_feature (61)..(61): /note="Nucleotide may be methylated to form 5-methylcytosine"
ttctgtaaactctccagactcctgtttccccatctgccaattgggtaacaatggtatatgcgtcatagtgatattttcaggaataaaatgagccaatacacgaaagttcttaactcatatta

SEQ ID NO: 26221 - DNA, 122 bp, Homo sapiens
  misc_feature (61)..(62): /note="This region represents a CpG dinucleotide"
  misc_feature (61)..(61): /note="Nucleotide may be methylated to form 5-methylcytosine"
tatctgaatgtcacactcgacccagaactcttgtcctctcttaccacttcccctacctcacgcaagctttagtgtttgaagtgaaggaggaaggtgtggtttgtctctgagacactttttat

SEQ ID NO: 26222 - DNA, 122 bp, Homo sapiens
  misc_feature (61)..(62): /note="This region represents a CpG dinucleotide"
  misc_feature (61)..(61): /note="Nucleotide may be methylated to form 5-methylcytosine"
gtcagcttccggagtgaccagagcagggctgttgtcatctcactggcaccttggttccatcgtaggatcagctgggttgcatggtctaggtcctgttggctggtccacttgtcctgggctgc

SEQ ID NO: 26223 - DNA, 122 bp, Homo sapiens
  misc_feature (61)..(62): /note="This region represents a CpG dinucleotide"
  misc_feature (61)..(61): /note="Nucleotide may be methylated to form 5-methylcytosine"
gcctgacattcaaggctagactgagactgcccaacccatttccctaacctacccttgcttcgtatcattctactgcctcccgttcttcttgtcgtatcatcctactgcctcccgttcttctt

SEQ ID NO: 26224 - DNA, 122 bp, Homo sapiens
  misc_feature (61)..(62): /note="This region represents a CpG dinucleotide"
  misc_feature (61)..(61): /note="Nucleotide may be methylated to form 5-methylcytosine"
aacatttaataaccctacttagctcaggaaacattgaagaaaccaagtgatgcataattacgttccacgcagtggcttgtctgcctcggcttcttactaaaatgcttgagccagttgcttct

SEQ ID NO: 26225 - DNA, 122 bp, Homo sapiens
  misc_feature (61)..(62): /note="This region represents a CpG dinucleotide"
  misc_feature (61)..(61): /note="Nucleotide may be methylated to form 5-methylcytosine"
atttctaaccaggaaggtaagggttacaaacaaccttaccttgtcatctcattttatagacgagataccgatcctcagagaatctaagtgatttgctcaggttcacagttagtaagtggtaa

SEQ ID NO: 26226 - DNA, 122 bp, Homo sapiens
  misc_feature (61)..(62): /note="This region represents a CpG dinucleotide"
  misc_feature (61)..(61): /note="Nucleotide may be methylated to form 5-methylcytosine"
ggggtaagtttggccagagcaaatctctaaaagagggtgtagctttatgtcttagtgaagcggtgtcattgtctggagtaaatacctgagatttgtcatctcacaccaagaagattaaggac

SEQ ID NO: 26227 - DNA, 122 bp, Homo sapiens
  misc_feature (61)..(62): /note="This region represents a CpG dinucleotide"
  misc_feature (61)..(61): /note="Nucleotide may be methylated to form 5-methylcytosine"
tggagggtgggagatgggagcctggagtggttgtctccgcgagccgtggtcgggtgtgctcgtgaaatgggtcattctgggctggggaggggcaaggaagcccctggctgtggccagagctg

SEQ ID NO: 26228 - DNA, 122 bp, Homo sapiens
  misc_feature (61)..(62): /note="This region represents a CpG dinucleotide"
  misc_feature (61)..(61): /note="Nucleotide may be methylated to form 5-methylcytosine"
tggggaaggtatggttccagtagagagctgcttctgccttagaaggcaatgagtcagaaacgcaaatctgagcaaaggcggaattactactacatgccagagagagtcacacatcagtcaag

SEQ ID NO: 26229 - DNA, 122 bp, Homo sapiens
  misc_feature (61)..(62): /note="This region represents a CpG dinucleotide"
  misc_feature (61)..(61): /note="Nucleotide may be methylated to form 5-methylcytosine"
aagaaatgtaaaaaactctagtttttaattttagaaaactgtttccgtttactttagctgcgaagagtaatcagattattgatgctttttagaagcttgggctctcttagcatcttgataca

SEQ ID NO: 26230 - DNA, 122 bp, Homo sapiens
  misc_feature (61)..(62): /note="This region represents a CpG dinucleotide"
  misc_feature (61)..(61): /note="Nucleotide may be methylated to form 5-methylcytosine"
tgcaagtttgtttaagcatattgcaaaattaaacagttctcctccactccctcacagatacgagtcaccttatcacagtcttcagtgagttttgtaatctgcatttagagcagtggtgagct

SEQ ID NO: 26231 - DNA, 122 bp, Homo sapiens
  misc_feature (61)..(62): /note="This region represents a CpG dinucleotide"
  misc_feature (61)..(61): /note="Nucleotide may be methylated to form 5-methylcytosine"
ttgtagttccgcctttggcaggagacttatttcctaggagtaactgggtgggctgcagtccgcctgcctcttcacattgagaagcgcttctcttgtgggaacgtctgtttctattcagcgga

SEQ ID NO: 26232 - DNA, 122 bp, Homo sapiens
  misc_feature (61)..(62): /note="This region represents a CpG dinucleotide"
  misc_feature (61)..(61): /note="Nucleotide may be methylated to form 5-methylcytosine"
tgaagtttctctttagatctttgtttccttcccctgagttctgcattttcttcccatgtacgtgtgccgtggaggagaatgaaaagaggaaatggcacaaaagtgaaccttgttgggtggct

SEQ ID NO: 26233 - DNA, 122 bp, Homo sapiens
  misc_feature (61)..(62): /note="This region represents a CpG dinucleotide"
  misc_feature (61)..(61): /note="Nucleotide may be methylated to form 5-methylcytosine"
agagcttgtctggcagctctgagatcatcacaggttctcaggacactcagtagcaagagccgtcccacttcagcagttcagatgttcgatcctgttatagcaaacaagttcagatgtctgat

SEQ ID NO: 26234 - DNA, 122 bp, Homo sapiens
  misc_feature (61)..(62): /note="This region represents a CpG dinucleotide"
  misc_feature (61)..(61): /note="Nucleotide may be methylated to form 5-methylcytosine"
agctgataagaaacctcagccagggttttgtttgtgtaattccacctcagtatttcccatcgcttttcattttcaaaattgtctgatgaaggatgcagagaagagaactaccttgagcccta

SEQ ID NO: 26235 - DNA, 122 bp, Homo sapiens
  misc_feature (61)..(62): /note="This region represents a CpG dinucleotide"
  misc_feature (61)..(61): /note="Nucleotide may be methylated to form 5-methylcytosine"
tgggacccagccgctccggccccccacccccagagacggcccaggcccccttattagcagcgtgagaacagacagacacaggcaggtcccaagctgcccacagcagaggaaagacctggatg

SEQ ID NO: 26236 - DNA, 122 bp, Homo sapiens
  misc_feature (61)..(62): /note="This region represents a CpG dinucleotide"
  misc_feature (61)..(61): /note="Nucleotide may be methylated to form 5-methylcytosine"
gcgtaggttcgagcatatggtaactggaacagaaaccaagtgttccagctgcccaaatggcgagagagggagagagggagagagggagagagggagggagggagggagggaagatcacagct

SEQ ID NO: 26237 - DNA, 122 bp, Homo sapiens
  misc_feature (61)..(62): /note="This region represents a CpG dinucleotide"
  misc_feature (61)..(61): /note="Nucleotide may be methylated to form 5-methylcytosine"
agttcgctcacccaaaattgtggttttaggaggaatgtttgaaaagataatgagatgaaacgaagatgttggttggagtggccaaagttattaatgttaacagcattattttcagccttgga

SEQ ID NO: 26238 - DNA, 122 bp, Homo sapiens
  misc_feature (61)..(62): /note="This region represents a CpG dinucleotide"
  misc_feature (61)..(61): /note="Nucleotide may be methylated to form 5-methylcytosine"
tctacatgactcagagagtcactatgagctcagggagagccggctccctgtaactgctggcgagtctcagtgggcgcatgactcctgtgcacatgccacagtcaaatgtagacaagtggcaa

SEQ ID NO: 26239 - DNA, 122 bp, Homo sapiens
  misc_feature (61)..(62): /note="This region represents a CpG dinucleotide"
  misc_feature (61)..(61): /note="Nucleotide may be methylated to form 5-methylcytosine"
aagtctgttgtctgcatgtctccccactaatgtgagtcatatagatggagtctcagggcacgactgggttttgtgtctctcgttgttgcttcacagcccttttggcatcacccatttattta

SEQ ID NO: 26240 - DNA, 122 bp, Homo sapiens
  misc_feature (61)..(62): /note="This region represents a CpG dinucleotide"
  misc_feature (61)..(61): /note="Nucleotide may be methylated to form 5-methylcytosine"
tggcctggcttgactagctgaatgcttgaagcactctttgcttatccttcctgttcattacgttaaccaggaaacttcccatggccgtggttctgtattaacattttctgaacagcgtgctc

SEQ ID NO: 26241 - DNA, 122 bp, Homo sapiens
  misc_feature (61)..(62): /note="This region represents a CpG dinucleotide"
  misc_feature (61)..(61): /note="Nucleotide may be methylated to form 5-methylcytosine"
tggtaccagagcacaatgactgtgtctgtgattcactaatccaagaaatcaggattagggcgtggaaggaggaattcgtgtttctggaagtccgtccacaaaattgtagcctcttgtcttga

SEQ ID NO: 26242 - DNA, 122 bp, Homo sapiens
  misc_feature (61)..(62): /note="This region represents a CpG dinucleotide"
  misc_feature (61)..(61): /note="Nucleotide may be methylated to form 5-methylcytosine"
tgaagtgcacaaactgctggttcagcttgataaacttgaggtgctggtcaaagaactgcccgtggctcacacccttgcggccaaaggtcatcgttcttgagatctcagggcgtatgcaggcc

SEQ ID NO: 26243 - DNA, 122 bp, Homo sapiens
  misc_feature (61)..(62): /note="This region represents a CpG dinucleotide"
  misc_feature (61)..(61): /note="Nucleotide may be methylated to form 5-methylcytosine"
aacctgggaagaattttttttttttccctttaaggatgattctacatgttgacaagaatacggtaacaccagtattctcacagagagctggtgggaacataatttggttaaacattttttgg

SEQ ID NO: 26244 - DNA, 122 bp, Homo sapiens
  misc_feature (61)..(62): /note="This region represents a CpG dinucleotide"
  misc_feature (61)..(61): /note="Nucleotide may be methylated to form 5-methylcytosine"
actatttctacagttgctacatcagcagtcccaggaacttggcctacggcctaggcatggcgtatgagctctatggtagtagaaggtcagacccaggattggaggaggggcagctgagtaga

SEQ ID NO: 26245 - DNA, 122 bp, Homo sapiens
  misc_feature (61)..(62): /note="This region represents a CpG dinucleotide"
  misc_feature (61)..(61): /note="Nucleotide may be methylated to form 5-methylcytosine"
gtgtgagggaggtaacgtattacctggttgtctgtccagacacaacctgcagcagtgaatcgtaaagcattgaagaatgacggagagttaactcactcagtcacaaacttcaacttactagt

SEQ ID NO: 26246 - DNA, 122 bp, Homo sapiens
  misc_feature (61)..(62): /note="This region represents a CpG dinucleotide"
  misc_feature (61)..(61): /note="Nucleotide may be methylated to form 5-methylcytosine"
tttgagggaaaacattgctcatttgggtatctgatttgtggtgtgttaaaacaagtttcacgtcttatagcagtccctgaatgaaaacatcataagatggtatctagaatggtgtgagaaaa

SEQ ID NO: 26247 - DNA, 122 bp, Homo sapiens
  misc_feature (61)..(62): /note="This region represents a CpG dinucleotide"
  misc_feature (61)..(61): /note="Nucleotide may be methylated to form 5-methylcytosine"
attagtgttcttcttcctatattcccatgataataaagaatgtttacagagtgcttaatgcgtgccagaaattgtcctaagctctttacacacattagctaatttaatcctcacaacattcc

SEQ ID NO: 26248 - DNA, 122 bp, Homo sapiens
  misc_feature (61)..(62): /note="This region represents a CpG dinucleotide"
  misc_feature (61)..(61): /note="Nucleotide may be methylated to form 5-methylcytosine"
ctgtcactcccctggagctgggaatggcattgggcggtggctcagggtcccttgccccagcggcaccatctctgcatttggccagcaaggctgatgggacttgtgtggacatttctgggacg

SEQ ID NO: 26249 - DNA, 122 bp, Homo sapiens
  misc_feature (61)..(62): /note="This region represents a CpG dinucleotide"
  misc_feature (61)..(61): /note="Nucleotide may be methylated to form 5-methylcytosine"
gtgagcgatttcacatcaggtataaactgggcacttctgggaaatttcagtccgtctgaacgttagtgacccaggaagtgcgagtgtgtggattagggggtttcccacacagagaagcaact

SEQ ID NO: 26250 - DNA, 122 bp, Homo sapiens
  misc_feature (61)..(62): /note="This region represents a CpG dinucleotide"
  misc_feature (61)..(61): /note="Nucleotide may be methylated to form 5-methylcytosine"
agcaaatgtgaaatgcatgtaaacacccagcactgcacctggcacttaggatgcccttgacgaggggcatgagacattgctatggggctacttgctgttgctatcacctcaatgtctactca

SEQ ID NO: 26251 - DNA, 122 bp, Homo sapiens
  misc_feature (61)..(62): /note="This region represents a CpG dinucleotide"
  misc_feature (61)..(61): /note="Nucleotide may be methylated to form 5-methylcytosine"
cctctgctgtccatgctaagcacaggttcaaccagcttcataggcactgaacatcctctgcgtcatgcttttcattcctgacacacagttcaaggaaaaacaaacccaaagtggcttttcct

SEQ ID NO: 26252 - DNA, 122 bp, Homo sapiens
  misc_feature (61)..(62): /note="This region represents a CpG dinucleotide"
  misc_feature (61)..(61): /note="Nucleotide may be methylated to form 5-methylcytosine"
tgcctgtcaagggtttggcttgcctgcagccatacaagatttttacgagcctcaacaatacgataaacactacacacctagctcccaggatgggctctcaaaattgctgtgcatgcaagatt

SEQ ID NO: 26253 - DNA, 122 bp, Homo sapiens
  misc_feature (61)..(62): /note="This region represents a CpG dinucleotide"
  misc_feature (61)..(61): /note="Nucleotide may be methylated to form 5-methylcytosine"
atatgtgacaataacagatgggtgagccacatgtccctgaaggcccctccagggcaagggcgggagagccccacatcacaggttcgtgccacgccacagacatgggaacagaggaaggttcc

SEQ ID NO: 26254 - DNA, 122 bp, Homo sapiens
  misc_feature (61)..(62): /note="This region represents a CpG dinucleotide"
  misc_feature (61)..(61): /note="Nucleotide may be methylated to form 5-methylcytosine"
acataaatcaacacaattacattccttcttgatagcatcaccagtcttcttgaggcctggcgtcaaacctctgcttcagtgttacgttatggggtgcgcatgcctccttaatacccaccttg

SEQ ID NO: 26255 - DNA, 122 bp, Homo sapiens
  misc_feature (61)..(62): /note="This region represents a CpG dinucleotide"
  misc_feature (61)..(61): /note="Nucleotide may be methylated to form 5-methylcytosine"
gcttattccaagatgtttaacctgttttactggaaagatgaagccatcattaactgggagcgagaagacaacagatagattatatttgaagaggtgagatcatggatatgatagctttcaga

SEQ ID NO: 26256 - DNA, 122 bp, Homo sapiens
  misc_feature (61)..(62): /note="This region represents a CpG dinucleotide"
  misc_feature (61)..(61): /note="Nucleotide may be methylated to form 5-methylcytosine"
atttagcgtttctttttgaagtctgaagatttatggaacaataaacgtcatttaatgctgcgtgctattttggattcctcactggttttagaatttgggtaaaactacttagctgaaagttt

SEQ ID NO: 26257 - DNA, 122 bp, Homo sapiens
  misc_feature (61)..(62): /note="This region represents a CpG dinucleotide"
  misc_feature (61)..(61): /note="Nucleotide may be methylated to form 5-methylcytosine"
gaggggtgacagactcattgcagatatcaggtgatcactgcagatatcatgtgatcgctgcggccttggagccagaggcgtccctgtttctgcttccccaagaggacattctcctcccatgg

SEQ ID NO: 26258 - DNA, 122 bp, Homo sapiens
  misc_feature (61)..(62): /note="This region represents a CpG dinucleotide"
  misc_feature (61)..(61): /note="Nucleotide may be methylated to form 5-methylcytosine"
tccttgatttctcactccaaataaggtgagccatagagaagaggttggctgatccctcaccggactcaaatggcagttgccattggcctgagaaaggaaaaggcagtgccaagcctaggaaa

SEQ ID NO: 26259 - DNA, 122 bp, Homo sapiens
  misc_feature (61)..(62): /note="This region represents a CpG dinucleotide"
  misc_feature (61)..(61): /note="Nucleotide may be methylated to form 5-methylcytosine"
gggttgtgtatggtctgacatttcccatttggtttcattgatttatgacttgttttctgtcggaagtaggtattttctttgtattttctttttttctcccttcactcttgccttagaggagt

SEQ ID NO: 26260 - DNA, 122 bp, Homo sapiens
  misc_feature (61)..(62): /note="This region represents a CpG dinucleotide"
  misc_feature (61)..(61): /note="Nucleotide may be methylated to form 5-methylcytosine"
gttggttgagggcccgcatatctgtttctgggtttggtgctatcaaggtcacacgggtgtcgccccagactcctctgctgcttacagggcctcatgctggcgtcaccatggcatcagcccag

SEQ ID NO: 26261 - DNA, 122 bp, Homo sapiens
  misc_feature (61)..(62): /note="This region represents a CpG dinucleotide"
  misc_feature (61)..(61): /note="Nucleotide may be methylated to form 5-methylcytosine"
ccatcagtgtatctcccccagcagctgtgccaaagcttcacaaaagtatttaaaacctgacgtcatggtgaggtactagacacctgggaaagtcccactcagtagactaagaatatcactct

SEQ ID NO: 26262 - DNA, 122 bp, Homo sapiens
  misc_feature (61)..(62): /note="This region represents a CpG dinucleotide"
  misc_feature (61)..(61): /note="Nucleotide may be methylated to form 5-methylcytosine"
ctcaggtgatccgcccgccttgacctcccaaagtgctgggattataggcttgagccaccgcgcctgctccagatgtattacttaatgtcctgcaacatcctctaatctgcctccaggggaag

SEQ ID NO: 26263 - DNA, 122 bp, Homo sapiens
  misc_feature (61)..(62): /note="This region represents a CpG dinucleotide"
  misc_feature (61)..(61): /note="Nucleotide may be methylated to form 5-methylcytosine"
actaactatctgcatggcagggcaaggtccttaacttcattaaacctccggttccttattcgtaaaatgaagacaataatggcacccattgggaggacttaaaaagctaatactgtgtatag

SEQ ID NO: 26264 - DNA, 122 bp, Homo sapiens
  misc_feature (61)..(62): /note="This region represents a CpG dinucleotide"
  misc_feature (61)..(61): /note="Nucleotide may be methylated to form 5-methylcytosine"
aattcttacactcctttgcgtctattaaaccaagaggataagcaacctggtaatttagcacggtcatgagcatttatctacacagtgggctccaaatgggtgtctgaaggtgagttgagtgt

SEQ ID NO: 26265 - DNA, 122 bp, Homo sapiens
  misc_feature (61)..(62): /note="This region represents a CpG dinucleotide"
  misc_feature (61)..(61): /note="Nucleotide may be methylated to form 5-methylcytosine"
catgccattgtttacaaggggaattgggtgaataaatgtagacagattacagtaaatccacgttgcctgcaaaagtgactaaggtgtatcctttactgataaagtaaggatgaaatgtggaa

SEQ ID NO: 26266 - DNA, 122 bp, Homo sapiens
  misc_feature (61)..(62): /note="This region represents a CpG dinucleotide"
  misc_feature (61)..(61): /note="Nucleotide may be methylated to form 5-methylcytosine"
tccttggacctgcatgtttctgcccacactcatgaaacctggtctggaattagctgtcagcgctgaaggaatgttggcgtaaacatcactcgtccactttcaccttttaaccaaatctcagg

SEQ ID NO: 26267 - DNA, 122 bp, Homo sapiens
  misc_feature (61)..(62): /note="This region represents a CpG dinucleotide"
  misc_feature (61)..(61): /note="Nucleotide may be methylated to form 5-methylcytosine"
ttgaaagggcagggtggttgccagccattcccacacctacacattttctcactctggtcccgtggtgtttaatagcttgcccagaaaaccttccctttgtcacattgatcttaattgagttg

SEQ ID NO: 26268 - DNA, 122 bp, Homo sapiens
  misc_feature (61)..(62): /note="This region represents a CpG dinucleotide"
  misc_feature (61)..(61): /note="Nucleotide may be methylated to form 5-methylcytosine"
tttgctttcgatgaacaggctctaatccttttggcttccctgttcttagctcttagtgcacgtaatcaatctttcctgtttatcctgaagatcaacactgatgatcttacaacctgagacaa

SEQ ID NO: 26269 - DNA, 122 bp, Homo sapiens
  misc_feature (61)..(62): /note="This region represents a CpG dinucleotide"
  misc_feature (61)..(61): /note="Nucleotide may be methylated to form 5-methylcytosine"
tgtttacttatagatgaactgtttaaatacatacattacataacacaaacatgtaagtgacgcaactgaaacagagcttcttctgtgtccttcctccagctcaatcagcaagcattgtccag

SEQ ID NO: 26270 - DNA, 122 bp, Homo sapiens
  misc_feature (61)..(62): /note="This region represents a CpG dinucleotide"
  misc_feature (61)..(61): /note="Nucleotide may be methylated to form 5-methylcytosine"
cccaggtgtgggaatcctgagaggtaattacggagagcttccgaatggagagcctgtggccgtggggtgaaagtgaaagtgaacagtgacagcggcctgttgggtggtactgggttctgagc

SEQ ID NO: 26271 - DNA, 122 bp, Homo sapiens
  misc_feature (61)..(62): /note="This region represents a CpG dinucleotide"
  misc_feature (61)..(61): /note="Nucleotide may be methylated to form 5-methylcytosine"
attagtcatcagggaaatacaaatcaaaaccacaatgagatgttacttcatacccaccagcgtagctataatcaaagatggacaataacaaatgttagtgaggatgtagagaaatcaaaact

SEQ ID NO: 26272 - DNA, 122 bp, Homo sapiens
  misc_feature (61)..(62): /note="This region represents a CpG dinucleotide"
  misc_feature (61)..(61): /note="Nucleotide may be methylated to form 5-methylcytosine"
ccctatctcagtagtaagcacattcaaagtgggttggttctgcaagacaacccctgccaacgaatttagggcctgttgttgggccttgatgctatgactgtagcttcccaagactgctgtac

SEQ ID NO: 26273 - DNA, 122 bp, Homo sapiens
  misc_feature (61)..(62): /note="This region represents a CpG dinucleotide"
  misc_feature (61)..(61): /note="Nucleotide may be methylated to form 5-methylcytosine"
tgacctcatgatccacctgcctcggcctcccaaaatgttgggattacaggcatgaggcaccgcgcccggctagaagccactttcctaatgtcaggaaggtagaaggtggtagatttaaaggg

SEQ ID NO: 26274 - DNA, 122 bp, Homo sapiens
  misc_feature (61)..(62): /note="This region represents a CpG dinucleotide"
  misc_feature (61)..(61): /note="Nucleotide may be methylated to form 5-methylcytosine"
cagccagcagtcttcttcacagtcacttggtattccccttgactgccattcatgcaaggacgatagagaacagtgacacattgacacatttaataggtaaaaggcttgccgaaaaactcttt

SEQ ID NO: 26275 - DNA, 122 bp, Homo sapiens
  misc_feature (61)..(62): /note="This region represents a CpG dinucleotide"
  misc_feature (61)..(61): /note="Nucleotide may be methylated to form 5-methylcytosine"
aaactattatctaataaaaaccaagcttccacaagatccaaaccaacccaccagttgtttcgtatacattgtccagtttacggttaataacaatgggaggataactcttgatacttgttact

SEQ ID NO: 26276 - DNA, 122 bp, Homo sapiens
  misc_feature (61)..(62): /note="This region represents a CpG dinucleotide"
  misc_feature (61)..(61): /note="Nucleotide may be methylated to form 5-methylcytosine"
gacttctgccagagctgcacatgtagttgaagaagaccagaataaggaagacagagccagcgccccagaccaggatgctgagtgcagcccacagcaacatagcagaaacttcctgggcctgc

SEQ ID NO: 26277 - DNA, 122 bp, Homo sapiens
  misc_feature (61)..(62): /note="This region represents a CpG dinucleotide"
  misc_feature (61)..(61): /note="Nucleotide may be methylated to form 5-methylcytosine"
accccctgcggcagtcccggatccgagcaacccccaatggctgtgtgtggaaggaggaagcgagaatgtggttacttaggcagggccatgtgacagcccacaccccattgtttgtgacagct

SEQ ID NO: 26278 - DNA, 122 bp, Homo sapiens
  misc_feature (61)..(62): /note="This region represents a CpG dinucleotide"
  misc_feature (61)..(61): /note="Nucleotide may be methylated to form 5-methylcytosine"
gtcgttgtccagctggccaagggctcctgggattagaggcgggaagtgggatctcaaggccgcactggcttgtgatgtcactttgcaagaactgcttttttttccacagtccatcccatctt

SEQ ID NO: 26279 - DNA, 122 bp, Homo sapiens
  misc_feature (61)..(62): /note="This region represents a CpG dinucleotide"
  misc_feature (61)..(61): /note="Nucleotide may be methylated to form 5-methylcytosine"
ttagagtggccctgcttttgacagcatgaccttgagctagtcccttcatctgctccttaacgaggcaggatgacataatttctcagggcctctgtctctcaatagcccatgcacctgactca

SEQ ID NO: 26280 - DNA, 122 bp, Homo sapiens
  misc_feature (61)..(62): /note="This region represents a CpG dinucleotide"
  misc_feature (61)..(61): /note="Nucleotide may be methylated to form 5-methylcytosine"
ttccacctccagtgcccagccccggggctggttgatgcataggtcctgcccactccaggacgctagtcacccaacagggttcagcccaggtgctggtgagacacttctcatccacccctcat

SEQ ID NO: 26281 - DNA, 122 bp, Homo sapiens
  misc_feature (61)..(62): /note="This region represents a CpG dinucleotide"
  misc_feature (61)..(61): /note="Nucleotide may be methylated to form 5-methylcytosine"
agaaaacataaaggaaatggtaagccactctgtggctggagatcattaactcttatcccccgtcttgccaaattcaagctgtcatgaagcagtgcctggctccagccttcctctcactgatc

SEQ ID NO: 26282 - DNA, 122 bp, Homo sapiens
  misc_feature (61)..(62): /note="This region represents a CpG dinucleotide"
  misc_feature (61)..(61): /note="Nucleotide may be methylated to form 5-methylcytosine"
caatgcattaggcacccaaaaagcctaacattcaaccgtaatatactggaggtcagaatacgtattatttagagttttaacttttgttaatctagatgcagggttgcctaaatcaaactctg

SEQ ID NO: 26283 - DNA, 122 bp, Homo sapiens
  misc_feature (61)..(62): /note="This region represents a CpG dinucleotide"
  misc_feature (61)..(61): /note="Nucleotide may be methylated to form 5-methylcytosine"
agtgaggtagatgctattatttcattttacaaatgcaggtactgaagatcagagatgttacgtcactcaccaaagtcacacagctggttagcgcagggtcaggaatcaaccctaagtctgta

SEQ ID NO: 26284 - DNA, 122 bp, Homo sapiens
  misc_feature (61)..(62): /note="This region represents a CpG dinucleotide"
  misc_feature (61)..(61): /note="Nucleotide may be methylated to form 5-methylcytosine"
tctgaattgaaatgagatggggtggtaccaaggtatcagcttgtccttattctgaaattacggtttgtgggtaatatcatttgagtcagtctttaaaaggttaacaggctgggcgtggtgac

SEQ ID NO: 26285 - DNA, 122 bp, Homo sapiens
  misc_feature (61)..(62): /note="This region represents a CpG dinucleotide"
  misc_feature (61)..(61): /note="Nucleotide may be methylated to form 5-methylcytosine"
ggaggcagcagggcacgccaagcacacggcacacgaggcccagtgctatgcacaccacggcggcagctgggctaacagaacaggtcccacatgcacaccttggggagtcagaggtgcctctg

SEQ ID NO: 26286 - DNA, 122 bp, Homo sapiens
  misc_feature (61)..(62): /note="This region represents a CpG dinucleotide"
  misc_feature (61)..(61): /note="Nucleotide may be methylated to form 5-methylcytosine"
gtcttaatcctagcaattgccttcaggagcctttagtttctggctcttttcctttgtagccgcatttcctactacgttccccacccatcattcctttcaaccacactggccaatgacctaat

SEQ ID NO: 26287 - DNA, 122 bp, Homo sapiens
  misc_feature (61)..(62): /note="This region represents a CpG dinucleotide"
  misc_feature (61)..(61): /note="Nucleotide may be methylated to form 5-methylcytosine"
aaattatgtcatttaaacctccctgttgagtaacagacttgacttctctcaacagtcaatcggatccacaagatgaagaatgccattgtgtgagtacagatttgaaccctgttgctaatcac

SEQ ID NO: 26288 - DNA, 122 bp, Homo sapiens
  misc_feature (61)..(62): /note="This region represents a CpG dinucleotide"
  misc_feature (61)..(61): /note="Nucleotide may be methylated to form 5-methylcytosine"
ctggagagtgcagggattgtacacaggctgagggccccaaacatcacattcagaatggcccggagggaactgcactttaatggggtggcacaggacagcagaaccctcagccagcagccaca

SEQ ID NO: 26289 - DNA, 122 bp, Homo sapiens
  misc_feature (61)..(62): /note="This region represents a CpG dinucleotide"
  misc_feature (61)..(61): /note="Nucleotide may be methylated to form 5-methylcytosine"
atgttgtgaatattaaatgagatcgttcttggaaagaatattagcaaggtacctggcgcacggtcagtgctccacagagtctgaggaggtgatgtatttgccaagagacaatgccaaagaag

SEQ ID NO: 26290 - DNA, 122 bp, Homo sapiens
  misc_feature (61)..(62): /note="This region represents a CpG dinucleotide"
  misc_feature (61)..(61): /note="Nucleotide may be methylated to form 5-methylcytosine"
ctgtacgaggaggagcctcccaccggggtgagcttaaatttgcggaaatatagaaagtcccgccccacccaactctgaccctggggcctcttgcagcagtatcaagggctgcttagagcctc

SEQ ID NO: 26291 - DNA, 122 bp, Homo sapiens
  misc_feature (61)..(62): /note="This region represents a CpG dinucleotide"
  misc_feature (61)..(61): /note="Nucleotide may be methylated to form 5-methylcytosine"
gggtgacagggcttggcagccatggtggcagcttgctggggcactggcacaaagtgacttcgtaaataccgcagctttgataatttcttgcttcactggtctcttgggattctttccatctg

SEQ ID NO: 26292 - DNA, 122 bp, Homo sapiens
  misc_feature (61)..(62): /note="This region represents a CpG dinucleotide"
  misc_feature (61)..(61): /note="Nucleotide may be methylated to form 5-methylcytosine"
gggtggaatgatgccaagagggcatactgagtgggttatttccagtctaatgacattttacgcaagaccagttgtaaagttgcatgcaggtttccaagaagaaaatgctttcccaaagaccg

SEQ ID NO: 26293 - DNA, 122 bp, Homo sapiens
  misc_feature (61)..(62): /note="This region represents a CpG dinucleotide"
  misc_feature (61)..(61): /note="Nucleotide may be methylated to form 5-methylcytosine"
ctcctttccagcctgctggaaattccttcttggaccacaggaaacacacgagggatgtggcgtgggggaatcccagcttctactagtaggcaggcaaagtggaagggaaattcctcaatcag

SEQ ID NO: 26294 - DNA, 122 bp, Homo sapiens
  misc_feature (61)..(62): /note="This region represents a CpG dinucleotide"
  misc_feature (61)..(61): /note="Nucleotide may be methylated to form 5-methylcytosine"
cttcccagaatggatttcactaacattattcatcatattactcaagtgttcccctggaaacgctagatatctgtgtttcattttcttttatgaccagtcttccattttgtagcaaagaacta

SEQ ID NO: 26295 - DNA, 122 bp, Homo sapiens
  misc_feature (61)..(62): /note="This region represents a CpG dinucleotide"
  misc_feature (61)..(61): /note="Nucleotide may be methylated to form 5-methylcytosine"
caggattaagccagatttacaaaatgggaagcttgcctgaagctgttgatgctgccaggccgaaggccactctagtggacagtgagtcagcagatgatgaactcacaaacttgaactggctt

SEQ ID NO: 26296 - DNA, 122 bp, Homo sapiens
  misc_feature (61)..(62): /note="This region represents a CpG dinucleotide"
  misc_feature (61)..(61): /note="Nucleotide may be methylated to form 5-methylcytosine"
tgttacagatggagaagatgactcagagtgggtccagaattcacccattgtcatactgtccgtaaaaggcagaagagatcagtgctcctattaaaagaccagatcacaggattcaaatttgc

SEQ ID NO: 26297 - DNA, 122 bp, Homo sapiens
  misc_feature (61)..(62): /note="This region represents a CpG dinucleotide"
  misc_feature (61)..(61): /note="Nucleotide may be methylated to form 5-methylcytosine"
tctgctccctcccatccgtgcctcagggcccataaggataatttctccctaacacaaatgcgaatgggaaacgaggattaagcataccattcagagaagcaagtccatgatagagtccatat

SEQ ID NO: 26298 - DNA, 122 bp, Homo sapiens
  misc_feature (61)..(62): /note="This region represents a CpG dinucleotide"
  misc_feature (61)..(61): /note="Nucleotide may be methylated to form 5-methylcytosine"
gtacaaggaattaagctctgattgatgctacaatgtggatgaacctcaaaaacaggatgccgagtgaaggaagccagacacaaaaggctgcatagcatttaatagatttatatgaaatatcc

SEQ ID NO: 26299 - DNA, 122 bp, Homo sapiens
  misc_feature (61)..(62): /note="This region represents a CpG dinucleotide"
  misc_feature (61)..(61): /note="Nucleotide may be methylated to form 5-methylcytosine"
ctctctgaaaaacgctgtttgctgtccagtcacacctctgtggaatcttttaacacatggcgattctgtggcaggatacctgtgttggttttgttttcacagagtggtcacaaagctgagtt

SEQ ID NO: 26300 - DNA, 122 bp, Homo sapiens
  misc_feature (61)..(62): /note="This region represents a CpG dinucleotide"
  misc_feature (61)..(61): /note="Nucleotide may be methylated to form 5-methylcytosine"
gtggtcctgtgattaattaagtcatgcctgtctcctccactgggatatgtgttaccccagcgtcatttcatgattgacacacagtgggcaacaatggatattccttgaatgaagaggctaat

SEQ ID NO: 26301 - DNA, 122 bp, Homo sapiens
  misc_feature (61)..(62): /note="This region represents a CpG dinucleotide"
  misc_feature (61)..(61): /note="Nucleotide may be methylated to form 5-methylcytosine"
tcctggatgtttgggagtctgggggctggctctgggggactgctaatccagagatttgcccgactctaagaggattctggcttcctagaacccttcctgtgtttcccaggctggcctgcatg

SEQ ID NO: 26302 - DNA, 122 bp, Homo sapiens
  misc_feature (61)..(62): /note="This region represents a CpG dinucleotide"
  misc_feature (61)..(61): /note="Nucleotide may be methylated to form 5-methylcytosine"
gtctcttcgctgtcacagagtaactaaaggccagagcctcagatttgcttattcactcatcgcaacaatggggaattgaagacttgttggaatgataaaattcttgccaatatccaagaaga

SEQ ID NO: 26303 - DNA, 122 bp, Homo sapiens
  misc_feature (61)..(62): /note="This region represents a CpG dinucleotide"
  misc_feature (61)..(61): /note="Nucleotide may be methylated to form 5-methylcytosine"
agtatctgtttaaaggaatttagtctaagcctctattattaccaataaggaaacaaggcccgaaagaagctaaatgactcgcctaaggtcactcatctaatgagtggctaagtgaagaatag

SEQ ID NO: 26304 - DNA, 122 bp, Homo sapiens
  misc_feature (61)..(62): /note="This region represents a CpG dinucleotide"
  misc_feature (61)..(61): /note="Nucleotide may be methylated to form 5-methylcytosine"
atatcctccaaacactctcagtccagggagtgaaatgaaaataaaaagcaggtacttccacgggcagcttaatggagtgccccagctggctgcaactctatcaatagtcacatcacacatga

SEQ ID NO: 26305 - DNA, 122 bp, Homo sapiens
  misc_feature (61)..(62): /note="This region represents a CpG dinucleotide"
  misc_feature (61)..(61): /note="Nucleotide may be methylated to form 5-methylcytosine"
ctgcctttcttccttccttccctccctcccagcagcattgttgagcatttataaagtgaccgtcacaccatcggttttacattgcaatgtcaggggcctgaaagtagatataaactgccagt

SEQ ID NO: 26306 - DNA, 122 bp, Homo sapiens
  misc_feature (61)..(62): /note="This region represents a CpG dinucleotide"
  misc_feature (61)..(61): /note="Nucleotide may be methylated to form 5-methylcytosine"
cactgcctgaggctgccagctcgtgctctacctgcagccatcacctgcagtgggagaagccggaatcccctaatcacctccagcaaagcagcagataagcaccttgtagttcaacccaggag

SEQ ID NO: 26307 - DNA, 122 bp, Homo sapiens
  misc_feature (61)..(62): /note="This region represents a CpG dinucleotide"
  misc_feature (61)..(61): /note="Nucleotide may be methylated to form 5-methylcytosine"
ctactcttcagggagaacagccacagtcatgccctagaaacctacttagggtgccattctcgctgccacttgacctgagacactgcctcttctagcactgtgtcactaccattagaccctgg

SEQ ID NO: 26308 - DNA, 122 bp, Homo sapiens
  misc_feature (61)..(62): /note="This region represents a CpG dinucleotide"
  misc_feature (61)..(61): /note="Nucleotide may be methylated to form 5-methylcytosine"
tcagataaggctaaatattacaaaaagaaaatttccaactttcctttctccctaaccccacgcagtcattgtcccttattggagcagcccagaaagccctggatgaatcactggctgctatt

SEQ ID NO: 26309 - DNA, 122 bp, Homo sapiens
  misc_feature (61)..(62): /note="This region represents a CpG dinucleotide"
  misc_feature (61)..(61): /note="Nucleotide may be methylated to form 5-methylcytosine"
tctatgttaattgttacaccccataaatgtgccgttgtttcctaatcattcgttgaagaccgagacctttttgctgaggacaggccccctgactggagtcccacactatctttctctcaaag

SEQ ID NO: 26310 - DNA, 122 bp, Homo sapiens
  misc_feature (61)..(62): /note="This region represents a CpG dinucleotide"
  misc_feature (61)..(61): /note="Nucleotide may be methylated to form 5-methylcytosine"
tctaagcactgactatgccaggaaggctgcccagccaggaccccgtggcccacggggcgtcgtcctgttcctgcagtggcacatgcagttgtgggagagccagtgcccccacgccgtgtcat

SEQ ID NO: 26311 - DNA, 122 bp, Homo sapiens
  misc_feature (61)..(62): /note="This region represents a CpG dinucleotide"
  misc_feature (61)..(61): /note="Nucleotide may be methylated to form 5-methylcytosine"
tgcagctgtatccaagaaagccagcccagaggctgccagcactcccagggaccctattgacgttgacctggtgagatgggtttgaggtctgaaggggtggtggtggggcccagcaggtcagg

SEQ ID NO: 26312 - DNA, 122 bp, Homo sapiens
  misc_feature (61)..(62): /note="This region represents a CpG dinucleotide"
  misc_feature (61)..(61): /note="Nucleotide may be methylated to form 5-methylcytosine"
aatggcccaaagctctatgttggctgacagctttgtgtcagagattcaacagcgccttagcggagtctattactaaaatacacagacccaggtctcatggtcctgtctgatgcttggccact

SEQ ID NO: 26313 - DNA, 122 bp, Homo sapiens
  misc_feature (61)..(62): /note="This region represents a CpG dinucleotide"
  misc_feature (61)..(61): /note="Nucleotide may be methylated to form 5-methylcytosine"
ttttcactctacatgccacgtgacttcttaaacacacacttcctattatttgtgcgcctgcggcttttactgtgtttacacagtagcaaagccgggatcccccgcagatatcccctgagatt

SEQ ID NO: 26314 - DNA, 122 bp, Homo sapiens
  misc_feature (61)..(62): /note="This region represents a CpG dinucleotide"
  misc_feature (61)..(61): /note="Nucleotide may be methylated to form 5-methylcytosine"
ttccattttaatatctgaaatcaggatgcatcttataactggtagcattttttctttctccgtagtacattaaataaaattttactgcattttgttgaactgattccatcagttgtatcaga

SEQ ID NO: 26315 - DNA, 122 bp, Homo sapiens
  misc_feature (61)..(62): /note="This region represents a CpG dinucleotide"
  misc_feature (61)..(61): /note="Nucleotide may be methylated to form 5-methylcytosine"
aggtcagtttaacctgactcacccatggccagaagtgtcacaatgtggacatgactagaccgcctttgcaaatccccaaagcttgaccactcccttggccaactgcagggttgcggttttcg

SEQ ID NO: 26316 - DNA, 122 bp, Homo sapiens
  misc_feature (61)..(62): /note="This region represents a CpG dinucleotide"
  misc_feature (61)..(61): /note="Nucleotide may be methylated to form 5-methylcytosine"
ggggtgacgagattgaccctatcctcatgggcatctcagctgggctgagtgtgctggaaccggccattgcatggacacagtcactcctgaggggatgtgatcaacaggcggaattctgtcac

SEQ ID NO: 26317 - DNA, 122 bp, Homo sapiens
  misc_feature (61)..(62): /note="This region represents a CpG dinucleotide"
  misc_feature (61)..(61): /note="Nucleotide may be methylated to form 5-methylcytosine"
taagactcgtcaactttcatctttcctggtttctgcaaagttgatgatgaaatttcctaacgtcttctcagaaagcttaacactggatttagacttgtctctatcaggcactttctggtgcc

SEQ ID NO: 26318 - DNA, 122 bp, Homo sapiens
  misc_feature (61)..(62): /note="This region represents a CpG dinucleotide"
  misc_feature (61)..(61): /note="Nucleotide may be methylated to form 5-methylcytosine"
cttcacgctccttctcactaacaggctccttgacttgtttttaagctttctggcagacaacggatctcacaggaagctccaatgtggacgttcatatcgacagttaatgatgcattgttttt

SEQ ID NO: 26319 - DNA, 122 bp, Homo sapiens
  misc_feature (61)..(62): /note="This region represents a CpG dinucleotide"
  misc_feature (61)..(61): /note="Nucleotide may be methylated to form 5-methylcytosine"
tctgttcagtcctttgtgtgtacttctcaggcagtactgaagacagagagataaaaggggcggtgctgacacacgtagatgactggggctctgacaatgaccgtgagctgatgacctgagtc

SEQ ID NO: 26320 - DNA, 122 bp, Homo sapiens
  misc_feature (61)..(62): /note="This region represents a CpG dinucleotide"
  misc_feature (61)..(61): /note="Nucleotide may be methylated to form 5-methylcytosine"
ggaaatgaaagagataagtatgaaaaaatccatgctcatagtagctgtggtttccaactgcgtgataaaactttaaaatctgcattcaaataagaacaactatgtcgacgtaaggttacaag

SEQ ID NO: 26321 - DNA, 122 bp, Homo sapiens
  misc_feature (61)..(62): /note="This region represents a CpG dinucleotide"
  misc_feature (61)..(61): /note="Nucleotide may be methylated to form 5-methylcytosine"
gagtcataaataggaaccacagtcttgacaaccactaactagctaatcattagagctagtcgtttagagttaatctttctccaaatgatcacaagttagcaaaagggccagtgcaaaaaggc

SEQ ID NO: 26322 - DNA, 122 bp, Homo sapiens
  misc_feature (61)..(62): /note="This region represents a CpG dinucleotide"
  misc_feature (61)..(61): /note="Nucleotide may be methylated to form 5-methylcytosine"
agttaagatcattttgcatgagtgaattaaacaatgaactcaaatctctgtagaaaatctcggtttcacttagaggaactttttgaccacagagaatataaactgttggaacacatgtcatc

SEQ ID NO: 26323 - DNA, 122 bp, Homo sapiens
  misc_feature (61)..(62): /note="This region represents a CpG dinucleotide"
  misc_feature (61)..(61): /note="Nucleotide may be methylated to form 5-methylcytosine"
gcaataatggatgatgccattacagcacaactgcagtcagaaagaaagagcgaaatgttgcggtttagttaatgctttggaaaaaatgtttttaaaactggcctccacccagtttcctgtgt

SEQ ID NO: 26324 - DNA, 122 bp, Homo sapiens
  misc_feature (61)..(62): /note="This region represents a CpG dinucleotide"
  misc_feature (61)..(61): /note="Nucleotide may be methylated to form 5-methylcytosine"
ccaccaggcccacagcagagcctgaatctcaggagcaggttttctaaattgttcagctgacggcaaatcctgtgcttctgactcatgactgtcccccaagggctggtttgtcctccctggtg

SEQ ID NO: 26325 - DNA, 122 bp, Homo sapiens
  misc_feature (61)..(62): /note="This region represents a CpG dinucleotide"
  misc_feature (61)..(61): /note="Nucleotide may be methylated to form 5-methylcytosine"
ctaaaagatacatgaatatgatacatacattggcacagttacgctgcccacagaacactacgcagtggctttaaaatgaattagttgaggtgtcatgactcacgcctgtcatctcagcactt

SEQ ID NO: 26326 - DNA, 122 bp, Homo sapiens
  misc_feature (61)..(62): /note="This region represents a CpG dinucleotide"
  misc_feature (61)..(61): /note="Nucleotide may be methylated to form 5-methylcytosine"
gctgcagcggctacttctgagcagagctcttaaccagactaacacgtgctcctggccacccgtggacttacggcaagagaagctcacaccagctcgggttcagcagcctccctctccacaca

SEQ ID NO: 26327 - DNA, 122 bp, Homo sapiens
  misc_feature (61)..(62): /note="This region represents a CpG dinucleotide"
  misc_feature (61)..(61): /note="Nucleotide may be methylated to form 5-methylcytosine"
tgtgttattacacatttctcttttgctctaatatttcattattttccagtttgtcagtaccgttatcagagggacgaggaaggaataacacaccagttgaccattttgtttctctgaaaatc

SEQ ID NO: 26328 - DNA, 122 bp, Homo sapiens
  misc_feature (61)..(62): /note="This region represents a CpG dinucleotide"
  misc_feature (61)..(61): /note="Nucleotide may be methylated to form 5-methylcytosine"
cactcaagccctgcaagttcaagccaaatcatcctgccaccgcaggaatgtgatgggtcacgctgctacctactgaaaatggggatttgggttaactagagtaaaatacagtaagaatgggt

SEQ ID NO: 26329 - DNA, 122 bp, Homo sapiens
  misc_feature (61)..(62): /note="This region represents a CpG dinucleotide"
  misc_feature (61)..(61): /note="Nucleotide may be methylated to form 5-methylcytosine"
aaaaaacattcctgggtgttaaagacaaaaggcctgtcagctttcaaaacaatttatatacgttacagagagaagagaaagtacttacaacttttctaaagtaaatgctctaagagaaaaga

SEQ ID NO: 26330 - DNA, 122 bp, Homo sapiens
  misc_feature (61)..(62): /note="This region represents a CpG dinucleotide"
  misc_feature (61)..(61): /note="Nucleotide may be methylated to form 5-methylcytosine"
cctaagtgtcactttgctaaggcaatacaatggatttcaacaaagaaatattcgtttccacgtagtttgatactgaaagcagaaaactttctttttactgcatgcaggaaatggttttcata

SEQ ID NO: 26331 - DNA, 122 bp, Homo sapiens
  misc_feature (61)..(62): /note="This region represents a CpG dinucleotide"
  misc_feature (61)..(61): /note="Nucleotide may be methylated to form 5-methylcytosine"
gcaggtcttgcaaagccatgggagctgcctgccaagctgctggtagctggaggccttggccgaggtgggctgcagtgcatgtgcccgcacaggtgtgcccacccaggtgtgcctgctcaggt

SEQ ID NO: 26332 - DNA, 122 bp, Homo sapiens
  misc_feature (61)..(62): /note="This region represents a CpG dinucleotide"
  misc_feature (61)..(61): /note="Nucleotide may be methylated to form 5-methylcytosine"
gcactaccatgtgctcgccagagaggatagagagtaacagttactgcctgtggcatttgccgatcttccctaacaggagtgtttccctgaactgtaaaacttcccgcaaattgcacacacag

SEQ ID NO: 26333 - DNA, 122 bp, Homo sapiens
  misc_feature (61)..(62): /note="This region represents a CpG dinucleotide"
  misc_feature (61)..(61): /note="Nucleotide may be methylated to form 5-methylcytosine"
tggagagaactcatgtggcccaggaaacatggacaggaatgttcataattgcaaaggcctcggtaacaaaagccagaagtccccaaatatccatgtgccagagaacaaatgcaatgagtttg

SEQ ID NO: 26334 - DNA, 122 bp, Homo sapiens
  misc_feature (61)..(62): /note="This region represents a CpG dinucleotide"
  misc_feature (61)..(61): /note="Nucleotide may be methylated to form 5-methylcytosine"
aaaccttcatgaatgggccatcctgtgcctgcaatcacagggaggtggggccgacagccacgggtcacgtaactgaggccaaacacaagaagctggcctggatcaatgagtcagggagagct

SEQ ID NO: 26335 - DNA, 122 bp, Homo sapiens
  misc_feature (61)..(62): /note="This region represents a CpG dinucleotide"
  misc_feature (61)..(61): /note="Nucleotide may be methylated to form 5-methylcytosine"
agggtactttatctcgtgcacacctatatgttccattatgccatatttacatttgtttaacgcatttaattaagaacattgttaaaaatttaaaaagacttcccctttcacgaaatttggaa

SEQ ID NO: 26336 - DNA, 122 bp, Homo sapiens
  misc_feature (61)..(62): /note="This region represents a CpG dinucleotide"
  misc_feature (61)..(61): /note="Nucleotide may be methylated to form 5-methylcytosine"
taactgttgtaaatcaacacattggcattctcgtttgctccaccagtttgttgtgaacttcgtcaggggaaggcatcatgcctaagtctattcaactctgggatactgacaaggtcaaattt

SEQ ID NO: 26337 - DNA, 122 bp, Homo sapiens
  misc_feature (61)..(62): /note="This region represents a CpG dinucleotide"
  misc_feature (61)..(61): /note="Nucleotide may be methylated to form 5-methylcytosine"
agaggaagtaaagggggagttgtaagagaggcggtatcaacagcctgctgatgaaagaggcgactctgcagaaagaggcaacttgacatatcaggactttaaccgctgtagaaatagctcag

SEQ ID NO: 26338 - DNA, 122 bp, Homo sapiens
  misc_feature (61)..(62): /note="This region represents a CpG dinucleotide"
  misc_feature (61)..(61): /note="Nucleotide may be methylated to form 5-methylcytosine"
ccaggccctgcacaggctgctggtggccatcggagacctaccctcactgtaacatgggtacgatcccttgcctgctatggacatgggaacccagtctctgcaagcccgatctcacccagctt

SEQ ID NO: 26339 - DNA, 122 bp, Homo sapiens
  misc_feature (61)..(62): /note="This region represents a CpG dinucleotide"
  misc_feature (61)..(61): /note="Nucleotide may be methylated to form 5-methylcytosine"
caactaactggtagcttagctgagaagtcactcccagaccctgggagcaagtgtgcctttcgccaatattgggatgatcttcccgtgaccccacagaagctctacgtcatcttacagtctct

SEQ ID NO: 26340 - DNA, 122 bp, Homo sapiens
  misc_feature (61)..(62): /note="This region represents a CpG dinucleotide"
  misc_feature (61)..(61): /note="Nucleotide may be methylated to form 5-methylcytosine"
tgtacaccctaagggaatgcaaggcatggcccagatccttcaggatgaagcatccagttacgtaagcattgttttagttttaaaacatgctgttaattaccatccctctatacttatttata

SEQ ID NO: 26341 - DNA, 122 bp, Homo sapiens
  misc_feature (61)..(62): /note="This region represents a CpG dinucleotide"
  misc_feature (61)..(61): /note="Nucleotide may be methylated to form 5-methylcytosine"
gaggaaggaaactgaggtgcaagaaacttacccaatgacacacacagctgctagtggaagcgccaggatctgaattcatttggtcagattccagagccacttagctgctcttaacattctgc

SEQ ID NO: 26342 - DNA, 122 bp, Homo sapiens
  misc_feature (61)..(62): /note="This region represents a CpG dinucleotide"
  misc_feature (61)..(61): /note="Nucleotide may be methylated to form 5-methylcytosine"
ccttccttagacacagaaccacacatgcagctaccccgggtggcacagcaccaccattgccgaccacaccagacctcatggagacagtgcacctgtttcctgtttgggagaacaccactcca

SEQ ID NO: 26343 - DNA, 122 bp, Homo sapiens
  misc_feature (61)..(62): /note="This region represents a CpG dinucleotide"
  misc_feature (61)..(61): /note="Nucleotide may be methylated to form 5-methylcytosine"
gtctgagttcctgagaaagacagcagtgaacttcctcattgcagcacagggcacttcctccggcagcacagggcagggatccccctaactgaacataggcttgccaccaccctatttcccca

SEQ ID NO: 26344 - DNA, 122 bp, Homo sapiens
  misc_feature (61)..(62): /note="This region represents a CpG dinucleotide"
  misc_feature (61)..(61): /note="Nucleotide may be methylated to form 5-methylcytosine"
aaaacgtgatacttgcaagagtttaaaacaacttgtaacaactggcagtgaggcggggcgcgtggagagagcaggataccaaaaaagctgtgtgtggcaatgcggggtggaggctgacctag

SEQ ID NO: 26345 - DNA, 122 bp, Homo sapiens
  misc_feature (61)..(62): /note="This region represents a CpG dinucleotide"
  misc_feature (61)..(61): /note="Nucleotide may be methylated to form 5-methylcytosine"
accaagtcatggtcactcctttcaaccctgcctgcccctgggccatctgtgttgtgatgccggctggccaggatggggagtgaggatttcagtttgtcatagggcagggagatgggtgaggc

SEQ ID NO: 26346 - DNA, 122 bp, Homo sapiens
  misc_feature (61)..(62): /note="This region represents a CpG dinucleotide"
  misc_feature (61)..(61): /note="Nucleotide may be methylated to form 5-methylcytosine"
atctgttaaacagggagctcagtgtctgtttgtccagcttctcagagttgctgtgcagctcggatgtggcataggaaacagcagacacagggagagggcagcataaggcactgtagggagca

SEQ ID NO: 26347 - DNA, 122 bp, Homo sapiens
  misc_feature (61)..(62): /note="This region represents a CpG dinucleotide"
  misc_feature (61)..(61): /note="Nucleotide may be methylated to form 5-methylcytosine"
cttcttagtttacactgagtgatttcatcccgaatcactgcttctattgttgccaaagcacgctggggtgtgagatgtagagctaagatattagaggtcagttttagacccctatatccaat

SEQ ID NO: 26348 - DNA, 122 bp, Homo sapiens
  misc_feature (61)..(62): /note="This region represents a CpG dinucleotide"
  misc_feature (61)..(61): /note="Nucleotide may be methylated to form 5-methylcytosine"
tcaaaacactctttagaacttacacacttcagttaaagaagccaaacacattttcactttcgtttttttcatagttctgttctcccatggaattttatatatttgaatatccactgagagtt

SEQ ID NO: 26349 - DNA, 122 bp, Homo sapiens
  misc_feature (61)..(62): /note="This region represents a CpG dinucleotide"
  misc_feature (61)..(61): /note="Nucleotide may be methylated to form 5-methylcytosine"
aagctcaagctcagccctttatctttgacaaataccacactgtgtatctgcttgttatttcgtggtcctgttgctcctgtcagcttgttaaatggaactctggtttcagtcagatgaaaatg

SEQ ID NO: 26350 - DNA, 122 bp, Homo sapiens
  misc_feature (61)..(62): /note="This region represents a CpG dinucleotide"
  misc_feature (61)..(61): /note="Nucleotide may be methylated to form 5-methylcytosine"
ttcccattcctctgtggatggagagactcagataatgagcaaggcctttgtgctctttagcggtgctcattggtggcgccacaggactaactcagaactcactttcataagcgcaccacaag

SEQ ID NO: 26351 - DNA, 122 bp, Homo sapiens
  misc_feature (61)..(62): /note="This region represents a CpG dinucleotide"
  misc_feature (61)..(61): /note="Nucleotide may be methylated to form 5-methylcytosine"
ggctcacccgctatgagaatgggtggctggagaggagctggcagacatcctgcaagagaacgaggctccttgataagtgcttttttgaccttactgtaactagtcataaagatctttgaaaa

SEQ ID NO: 26352 - DNA, 122 bp, Homo sapiens
  misc_feature (61)..(62): /note="This region represents a CpG dinucleotide"
  misc_feature (61)..(61): /note="Nucleotide may be methylated to form 5-methylcytosine"
caggtgatccacccgccttggcctccccaagtgccaggattacaggtgtttgagtcacgtcgcctggccagggaccacatgttgaatagagaggggttaagcagaagggatggccagagagc

SEQ ID NO: 26353 - DNA, 122 bp, Homo sapiens
  misc_feature (61)..(62): /note="This region represents a CpG dinucleotide"
  misc_feature (61)..(61): /note="Nucleotide may be methylated to form 5-methylcytosine"
tgtatattttcttctttcagaggagtttcatttatgcgtgagtcacctatgagttcactacgagtcattggcaatctaggatcactttaatctaatttcagggtttgagagattatctgcat

SEQ ID NO: 26354 - DNA, 122 bp, Homo sapiens
  misc_feature (61)..(62): /note="This region represents a CpG dinucleotide"
  misc_feature (61)..(61): /note="Nucleotide may be methylated to form 5-methylcytosine"
tcattcacatcgagctacacacacataaacacaatcacataaacaaacaaaaattgtgtgcgtgcgtaacttgtgaaaactgaataagttctatggatgacaccaatgttaatttcctgtct

SEQ ID NO: 26355 - DNA, 122 bp, Homo sapiens
  misc_feature (61)..(62): /note="This region represents a CpG dinucleotide"
  misc_feature (61)..(61): /note="Nucleotide may be methylated to form 5-methylcytosine"
actgtgacctgctgcacaaggccgccgcccatctgggctgttggcagaaggtggacccagcgctgtgctccaacgtgctgcagcacccgtgagtcaccctaccctgctcaacccaatcccag

SEQ ID NO: 26356 - DNA, 122 bp, Homo sapiens
  misc_feature (61)..(62): /note="This region represents a CpG dinucleotide"
  misc_feature (61)..(61): /note="Nucleotide may be methylated to form 5-methylcytosine"
ctcaaaaaatttacacaacagattgaatggcaacgaagagggaaccaagtgagacaaaaacgggaagctgactccaaccctgtctgtgttaactgcattctgtactgggaaggtgttgaatt

SEQ ID NO: 26357 - DNA, 122 bp, Homo sapiens
  misc_feature (61)..(62): /note="This region represents a CpG dinucleotide"
  misc_feature (61)..(61): /note="Nucleotide may be methylated to form 5-methylcytosine"
cactggaggaagaaagaggaggggggcccctattaaccctgggcctcctggcttctctgtcgccaccgcagagggagtgtggtgattgagaaacaagacagcttcaacaagaccggcagtgg

SEQ ID NO: 26358 - DNA, 122 bp, Homo sapiens
  misc_feature (61)..(62): /note="This region represents a CpG dinucleotide"
  misc_feature (61)..(61): /note="Nucleotide may be methylated to form 5-methylcytosine"
gccaaggtagggtaaggattttgcccagattcacgtagctgcctgtggtctgcagcccagcgcccctgccccctccacctcctggcaggcctgtgggcagatcctgtcttctgggaggggaa

SEQ ID NO: 26359 - DNA, 122 bp, Homo sapiens
  misc_feature (61)..(62): /note="This region represents a CpG dinucleotide"
  misc_feature (61)..(61): /note="Nucleotide may be methylated to form 5-methylcytosine"
ttgctggaccagaagagccttcctttcctcttgtcagctgaactggctctaagtgcagagcgtcatacagatttgcccaatacactagtcattttcagtgcccatgattcagctgccatggt

SEQ ID NO: 26360 - DNA, 122 bp, Homo sapiens
  misc_feature (61)..(62): /note="This region represents a CpG dinucleotide"
  misc_feature (61)..(61): /note="Nucleotide may be methylated to form 5-methylcytosine"
ataggaaaagatccaatctttgtaaaatgctttgggatctttaatgtccagtagacttcccgttttttgtgtgctttgccccaagtttcttgggtattaaattatgcacaattttgtttcct

SEQ ID NO: 26361 - DNA, 122 bp, Homo sapiens
  misc_feature (61)..(62): /note="This region represents a CpG dinucleotide"
  misc_feature (61)..(61): /note="Nucleotide may be methylated to form 5-methylcytosine"
cacccacaaagtgctagttaagcccaggggctgactgtcatgccacggctgtgagacacacgcctgcttggatggcacacccctgtctggcatttggggccttgtcattaagagctaatgca

SEQ ID NO: 26362 - DNA, 122 bp, Homo sapiens
  misc_feature (61)..(62): /note="This region represents a CpG dinucleotide"
  misc_feature (61)..(61): /note="Nucleotide may be methylated to form 5-methylcytosine"
cagatgttgccatagctacctggtgtgggagaccccacaaaagtcaaagttcaaagtcagcggacgtgacaattaagaaaacactggaagacctactctcagagggaaacacagtctcctca

SEQ ID NO: 26363 - DNA, 122 bp, Homo sapiens
  misc_feature (61)..(62): /note="This region represents a CpG dinucleotide"
  misc_feature (61)..(61): /note="Nucleotide may be methylated to form 5-methylcytosine"
ggctagtggctgtgtagcatcctcagtgcaaaacccagctccagaattttcacctggtaacgaatttcaactgacagtgaaatgaataggcctttaaactttataacattgcaattgtgatg

SEQ ID NO: 26364 - DNA, 122 bp, Homo sapiens
  misc_feature (61)..(62): /note="This region represents a CpG dinucleotide"
  misc_feature (61)..(61): /note="Nucleotide may be methylated to form 5-methylcytosine"
agcaagcattgagaattaaggaacctacagcctattcatagattctaaccctaagaggaacgaaattagcactttgtatggttgggtcattaaaggatctcatgaattaatactatcgtgtt

SEQ ID NO: 26365 - DNA, 122 bp, Homo sapiens
  misc_feature (61)..(62): /note="This region represents a CpG dinucleotide"
  misc_feature (61)..(61): /note="Nucleotide may be methylated to form 5-methylcytosine"
tgagacaggtgctggctgatttgcaggtgactgaagaaggctacataaggcccagaaagacgcttatctgtttgtaaacaaataggcttagcacatagctttaatacagttggtcactgcag

SEQ ID NO: 26366 - DNA, 122 bp, Homo sapiens
  misc_feature (61)..(62): /note="This region represents a CpG dinucleotide"
  misc_feature (61)..(61): /note="Nucleotide may be methylated to form 5-methylcytosine"
ggcttttcatcttctgtagcactcggattttgttattattaaagccttccctcatgaaaacgtgatgtcacccccgatggggtccagaaggtggtggttggttgggtgtacctctgccccag

SEQ ID NO: 26367 - DNA, 122 bp, Homo sapiens
  misc_feature (61)..(62): /note="This region represents a CpG dinucleotide"
  misc_feature (61)..(61): /note="Nucleotide may be methylated to form 5-methylcytosine"
cttcaggaagccaaccttgaccagaaagctgctgtcgctgtcctgggtggccatgaccaccgagtcatgaagcctctcatcaaagcagacgtggctctgggagtattacaggtcgagaaaat

SEQ ID NO: 26368 - DNA, 122 bp, Homo sapiens
  misc_feature (61)..(62): /note="This region represents a CpG dinucleotide"
  misc_feature (61)..(61): /note="Nucleotide may be methylated to form 5-methylcytosine"
ggtgattcatggattaacagattacactcatgacccaattacatcttaaaggccccatcacgctaccacactggagatgaagtttcaacatgagttttggagaggacaaatattaagccata

SEQ ID NO: 26369 - DNA, 122 bp, Homo sapiens
  misc_feature (61)..(62): /note="This region represents a CpG dinucleotide"
  misc_feature (61)..(61): /note="Nucleotide may be methylated to form 5-methylcytosine"
taaaggggaaactagaaaaggaacctgatgagtcaccatagggccaatagcgcagagaggcgggggtgcccctggtggtcagacttggttacacaccctgcaactctagagattgaccctta

SEQ ID NO: 26370 - DNA, 122 bp, Homo sapiens
  misc_feature (61)..(62): /note="This region represents a CpG dinucleotide"
  misc_feature (61)..(61): /note="Nucleotide may be methylated to form 5-methylcytosine"
cctcctcaccactctcgccggcagcattctgcagttcctctttttcatgtaactaactttcgattcacatcctgccacagacacatctgattggcaggtactatggcatgtgcccatgtcat

SEQ ID NO: 26371 - DNA, 122 bp, Homo sapiens
  misc_feature (61)..(62): /note="This region represents a CpG dinucleotide"
  misc_feature (61)..(61): /note="Nucleotide may be methylated to form 5-methylcytosine"
ggtgatccgcccacctcggcctcccaaagtgctgggattacaggcgtgagccaccacacccggccaggtctttgttttcttgagtatattataatgttgctttagagtgcctggtaatccca

SEQ ID NO: 26372 - DNA, 122 bp, Homo sapiens
  misc_feature (61)..(62): /note="This region represents a CpG dinucleotide"
  misc_feature (61)..(61): /note="Nucleotide may be methylated to form 5-methylcytosine"
aactcagacaaccttgcaattcctgcctatggatgacacggcaccagaaatgagctgatccgccctctgaggacaccccaggtaacctgacaaggagagtctagagcaacgtgttttgagca

SEQ ID NO: 26373 - DNA, 122 bp, Homo sapiens
  misc_feature (61)..(62): /note="This region represents a CpG dinucleotide"
  misc_feature (61)..(61): /note="Nucleotide may be methylated to form 5-methylcytosine"
gtcctttgtcctgctgtgtcagccttgtgtttgcttttcccatggccagcactgctgattcgccaggtgtttcctcttttatgctctcttaactttagctttaaaagtggagacatagactc

SEQ ID NO: 26374 - DNA, 122 bp, Homo sapiens
  misc_feature (61)..(62): /note="This region represents a CpG dinucleotide"
  misc_feature (61)..(61): /note="Nucleotide may be methylated to form 5-methylcytosine"
ttacgattcttcctttcctatttggcagagtcagacttcctcttttcataaacagaaatacgaagtagccagcaggccaaaattgtcaaaacaaagagtgagaggtaaagagtgaagaacgc

SEQ ID NO: 26375 - DNA, 122 bp, Homo sapiens
  misc_feature (61)..(62): /note="This region represents a CpG dinucleotide"
  misc_feature (61)..(61): /note="Nucleotide may be methylated to form 5-methylcytosine"
cagagactgccactgacctcgaccagcagtttcagtggaatggtgagatcagaacgcagacgggagtggggcaggccatgaaggtcagggtgatgatgcagtgaagacagacaactcttgtc

SEQ ID NO: 26376 - DNA, 122 bp, Homo sapiens
  misc_feature (61)..(62): /note="This region represents a CpG dinucleotide"
  misc_feature (61)..(61): /note="Nucleotide may be methylated to form 5-methylcytosine"
ctacacactgttcagagattgtggtttagatagaatgagctagggtctaaaagtctgtaacgtgcacccgcagggctgctgcccttatgccataggcttttgtcctatgaactagaaaaacg

SEQ ID NO: 26377 - DNA, 122 bp, Homo sapiens
  misc_feature (61)..(62): /note="This region represents a CpG dinucleotide"
  misc_feature (61)..(61): /note="Nucleotide may be methylated to form 5-methylcytosine"
ggaatcaccaatcatcatacaatagtgattttacactcacaatttcaattctgccaacagcggagaatttctcctttgccataggaacatgattaaattttacttaatttctctgtaggatg

SEQ ID NO: 26378 - DNA, 122 bp, Homo sapiens
  misc_feature (61)..(62): /note="This region represents a CpG dinucleotide"
  misc_feature (61)..(61): /note="Nucleotide may be methylated to form 5-methylcytosine"
gcctgctgttaagccctcagagatcttctgaggtcagtcctggaacgcctcagtaccccgcggtccaacactctggcccatcctagacggatgagtctcatctggtgccaccaccatgattc

SEQ ID NO: 26379 - DNA, 122 bp, Homo sapiens
  misc_feature (61)..(62): /note="This region represents a CpG dinucleotide"
  misc_feature (61)..(61): /note="Nucleotide may be methylated to form 5-methylcytosine"
ggctcctgagtgactaacagatggggagtggagacagcgtggagacactggacaaagggacgattcacatcctgggagggacaaagcagactgtgcaagatctcactgtgtgactcagaatg

SEQ ID NO: 26380 - DNA, 122 bp, Homo sapiens
  misc_feature (61)..(62): /note="This region represents a CpG dinucleotide"
  misc_feature (61)..(61): /note="Nucleotide may be methylated to form 5-methylcytosine"
atttattaatcaaaccatcaaaccccattatatagttgtaggaactgaggtccatgaaggcgatgtttattgcctaagatcaagcagtgagttagtggtgactcagacacggctaagtagat

SEQ ID NO: 26381 - DNA, 122 bp, Homo sapiens
  misc_feature (61)..(62): /note="This region represents a CpG dinucleotide"
  misc_feature (61)..(61): /note="Nucleotide may be methylated to form 5-methylcytosine"
tggagttttcaactcttaaacaggccatgtaagtcatttatttgttcagccagcatttagcgagatcgttctgttttagcattgctacatattaggactacatggatgattcagatggaatt

SEQ ID NO: 26382 - DNA, 122 bp, Homo sapiens
  misc_feature (61)..(62): /note="This region represents a CpG dinucleotide"
  misc_feature (61)..(61): /note="Nucleotide may be methylated to form 5-methylcytosine"
caatagaaatcagatttgtggtacttctggttgggggtggggcttatctggaagtggtcacgaggaactcatctggggtgatggaaatgttctgtctccatacgtatgtgtcgaaactgatt

SEQ ID NO: 26383 - DNA, 122 bp, Homo sapiens
  misc_feature (61)..(62): /note="This region represents a CpG dinucleotide"
  misc_feature (61)..(61): /note="Nucleotide may be methylated to form 5-methylcytosine"
acaaacatactataaacataccatttttagttattttccttgcataaatccgtgaagggacgaggcctaaagaggactccgtcccaagcccgagagagtcagcccacatgttttcatgctgg

SEQ ID NO: 26384 - DNA, 122 bp, Homo sapiens
  misc_feature (61)..(62): /note="This region represents a CpG dinucleotide"
  misc_feature (61)..(61): /note="Nucleotide may be methylated to form 5-methylcytosine"
acttcagaaaacatctgattgcctgcaatctagaaatttcactcctactttataccctagcgcagtggacgtcaaactttatcagatatcagagtcacctgatatctgatattacaacacag

SEQ ID NO: 26385 - DNA, 122 bp, Homo sapiens
  misc_feature (61)..(62): /note="This region represents a CpG dinucleotide"
  misc_feature (61)..(61): /note="Nucleotide may be methylated to form 5-methylcytosine"
gtccaactaacatagttagctagctagctgtgccatgtaggctaacctacacaaacatgacgtaagatacatactttaatttcagctgcctgagaaatgaaacttttcttctcagtgcctag

SEQ ID NO: 26386 - DNA, 122 bp, Homo sapiens
  misc_feature (61)..(62): /note="This region represents a CpG dinucleotide"
  misc_feature (61)..(61): /note="Nucleotide may be methylated to form 5-methylcytosine"
agaaatacaggatgtaaataaaatcttcattaagcaaggtatatgtaaactctacaagtacggcaggttaatgaccataaggagagaatggccctcacctctggatgctgtggcagggacat

SEQ ID NO: 26387 - DNA, 122 bp, Homo sapiens
  misc_feature (61)..(62): /note="This region represents a CpG dinucleotide"
  misc_feature (61)..(61): /note="Nucleotide may be methylated to form 5-methylcytosine"
attgcatcagttacacactggtggaatgttctctctcagtcagcaatagtcaagtgggggcgagtggggaagggataaatagggcctatctgagcaggtggagctgaacatagtttacaaaa

SEQ ID NO: 26388 - DNA, 122 bp, Homo sapiens
  misc_feature (61)..(62): /note="This region represents a CpG dinucleotide"
  misc_feature (61)..(61): /note="Nucleotide may be methylated to form 5-methylcytosine"
gggagagagagattccggtaatgttgcctctagtctgcttctctattgcgggctgcaggacgttgggtaactcaagaaggatctctgggcctcacgttcctcctgtgggagatatcagggtt

SEQ ID NO: 26389 - DNA, 122 bp, Homo sapiens
  misc_feature (61)..(62): /note="This region represents a CpG dinucleotide"
  misc_feature (61)..(61): /note="Nucleotide may be methylated to form 5-methylcytosine"
gggagagtgaagtgtttgctgaggacattgctcctctgactcccatctcactttgtccatcgcagccttttgttgggagatgacactgtcagtcagcccatgatgtctgttcacacgagatg

SEQ ID NO: 26390 - DNA, 122 bp, Homo sapiens
  misc_feature (61)..(62): /note="This region represents a CpG dinucleotide"
  misc_feature (61)..(61): /note="Nucleotide may be methylated to form 5-methylcytosine"
agggacacaacagcagccttcttccgtgcccgcgcaatcctccaccagtgtctgctctgccgatgaatcagcttttgattctgaagtatttcaaaatctttggctgcaatcagtaggcccaa

SEQ ID NO: 26391 - DNA, 122 bp, Homo sapiens
  misc_feature (61)..(62): /note="This region represents a CpG dinucleotide"
  misc_feature (61)..(61): /note="Nucleotide may be methylated to form 5-methylcytosine"
tgaggaaggcaggatgcaatgactcagcaagtcctcaagagcctctttcttacaggtgatcggacaatgtaaggtaatagctacaagacattcccatgaatctcaggacctcagagtgattg

SEQ ID NO: 26392 - DNA, 122 bp, Homo sapiens
  misc_feature (61)..(62): /note="This region represents a CpG dinucleotide"
  misc_feature (61)..(61): /note="Nucleotide may be methylated to form 5-methylcytosine"
ttcccatttaccctgagactctgcatcctcatctgccgaaactgacaattttgcttctaccgaactgaaagggtagtttcaaagatgaaatgaatcaatgtgtatgaaagctcttttaaaac

SEQ ID NO: 26393 - DNA, 122 bp, Homo sapiens
  misc_feature (61)..(62): /note="This region represents a CpG dinucleotide"
  misc_feature (61)..(61): /note="Nucleotide may be methylated to form 5-methylcytosine"
tcagtttccccttctgcagactgggcacgagtgtcctgccctgcttgctttgcagagccacggagataaacccagaggaatcactttgcaaactgcaaggtgagccgccaagatgagaacac

SEQ ID NO: 26394 - DNA, 122 bp, Homo sapiens
  misc_feature (61)..(62): /note="This region represents a CpG dinucleotide"
  misc_feature (61)..(61): /note="Nucleotide may be methylated to form 5-methylcytosine"
tgaaatcacaagctgtaatcaccagagcagtgtaacagaattcctgggtcatgagatagccgtgactgttctgactcatgtcacacaaggggaaaattagcgtgtttctagtcctaagagtt

SEQ ID NO: 26395 - DNA, 122 bp, Homo sapiens
  misc_feature (61)..(62): /note="This region represents a CpG dinucleotide"
  misc_feature (61)..(61): /note="Nucleotide may be methylated to form 5-methylcytosine"
gagaattaattagcagctccctctgttggtgttctttttcagccttctcacattgcagcacgagagtcccttagacatgctggctgctcatttgataatctgtgttttgctcagtacaaaag

SEQ ID NO: 26396 - DNA, 122 bp, Homo sapiens
  misc_feature (61)..(62): /note="This region represents a CpG dinucleotide"
  misc_feature (61)..(61): /note="Nucleotide may be methylated to form 5-methylcytosine"
tgttgaccacacgtggcttccaagcatacttaatttgcttaggctcgggtgtactcaggccgtcagtcctgcggaacagggagaaccagtccaggcctgggtgtactgacttacctggtttc

SEQ ID NO: 26397 - DNA, 122 bp, Homo sapiens
  misc_feature (61)..(62): /note="This region represents a CpG dinucleotide"
  misc_feature (61)..(61): /note="Nucleotide may be methylated to form 5-methylcytosine"
ctctaccctgtccttcctaatataactgctattctttaccttcctgtttttcaaaactctcgtattgttcctgttgtgttttttctaaatattttcttggttacaataaagtgctaatattt

SEQ ID NO: 26398 - DNA, 122 bp, Homo sapiens
  misc_feature (61)..(62): /note="This region represents a CpG dinucleotide"
  misc_feature (61)..(61): /note="Nucleotide may be methylated to form 5-methylcytosine"
actgtagcctgggtgatttatacagaacagaaatgtatttctcaaggtgtcagtgggttgcgtggtgagggctgctgtctgcttcccatgtggcatcctatggctttatcctccagaaggaa

SEQ ID NO: 26399 - DNA, 122 bp, Homo sapiens
  misc_feature (61)..(62): /note="This region represents a CpG dinucleotide"
  misc_feature (61)..(61): /note="Nucleotide may be methylated to form 5-methylcytosine"
cgagcattcgaaaccaggtctgccaggcagcaaaggctaaatggtattttaaaaaggtgtcgcttctgagtgtatgtgttcaaggaatctctaggtaaaatacaagcatagcttccatgtag

SEQ ID NO: 26400 - DNA, 122 bp, Homo sapiens
  misc_feature (61)..(62): /note="This region represents a CpG dinucleotide"
  misc_feature (61)..(61): /note="Nucleotide may be methylated to form 5-methylcytosine"
agaaagcaatttaccaaagccacaggcttcttcctggaagctcaaaggcatgcctttattcgtgatttctgaagcaaggtgcatgcagcacctgagctgatgtggaagagggtttgcaggga

SEQ ID NO: 26401 - DNA, 122 bp, Homo sapiens
  misc_feature (61)..(62): /note="This region represents a CpG dinucleotide"
  misc_feature (61)..(61): /note="Nucleotide may be methylated to form 5-methylcytosine"
ctccacgcctaattaagtcagatctgtccaagttctcgtaacagtatacaaatcctttctcgctctcagcagtttgtaattatgtattcgggtcagtctccttactagacggtaagctctat

SEQ ID NO: 26402 - DNA, 122 bp, Homo sapiens
  misc_feature (61)..(62): /note="This region represents a CpG dinucleotide"
  misc_feature (61)..(61): /note="Nucleotide may be methylated to form 5-methylcytosine"
caatggaaaatttattaatagaagcacagagatgtcttagaaaagcttatgagaaagaggcggggcaactggcaggaaagaaactagatgttgttaacacccatcccacatatttccaacca

SEQ ID NO: 26403 - DNA, 122 bp, Homo sapiens
  misc_feature (61)..(62): /note="This region represents a CpG dinucleotide"
  misc_feature (61)..(61): /note="Nucleotide may be methylated to form 5-methylcytosine"
gggtagaccccactgagaaagtaacgtttgggcaaagtcttaacgtgagagagttaaccacgccaggccaggctttgcaaaggctcttagatggaagcatacccatcatgtttgaaaaacca

SEQ ID NO: 26404 - DNA, 122 bp, Homo sapiens
  misc_feature (61)..(62): /note="This region represents a CpG dinucleotide"
  misc_feature (61)..(61): /note="Nucleotide may be methylated to form 5-methylcytosine"
gtgaaacaggggaggcaaagagaatgaggtaggtggtatgatcctggaaagtgcacaatgcgatctctgacatgcctgcttcccattggaaaaagacaaattcctcattcctcttcttggta

SEQ ID NO: 26405 - DNA, 122 bp, Homo sapiens
  misc_feature (61)..(62): /note="This region represents a CpG dinucleotide"
  misc_feature (61)..(61): /note="Nucleotide may be methylated to form 5-methylcytosine"
cactcagtaatgttagctgttattatcatgttttaataactaattttctccccactccttcgtaatataacatagagtcatacctgtggcactttaatacactgcccattttgagtcaattt

SEQ ID NO: 26406 - DNA, 122 bp, Homo sapiens
  misc_feature (61)..(62): /note="This region represents a CpG dinucleotide"
  misc_feature (61)..(61): /note="Nucleotide may be methylated to form 5-methylcytosine"
aagggttgaagggtgttttattataaagttaagctgcagttgggcaggaaaccacaatgtcgaagacattctcttgaaggaactgttaaggtaacaccaagagcaagtgataatactgaagt

SEQ ID NO: 26407 - DNA, 122 bp, Homo sapiens
  misc_feature (61)..(62): /note="This region represents a CpG dinucleotide"
  misc_feature (61)..(61): /note="Nucleotide may be methylated to form 5-methylcytosine"
atggtgaccaaacaatgttggactatggcttagcttctgtaataggatgaccgactctcccgtcacaaagagctgagaaaggaaagagaaaaccacagtgatgacaaagtacgacaaatggc

SEQ ID NO: 26408 - DNA, 122 bp, Homo sapiens
  misc_feature (61)..(62): /note="This region represents a CpG dinucleotide"
  misc_feature (61)..(61): /note="Nucleotide may be methylated to form 5-methylcytosine"
tgccaatgccgttccttactggtgtgtatattactgtttttgtccttttcatgcagcctgcggagtgtacctctatagctgtcatttcactcctgtgttttctcggccttgggcgaggatcc

SEQ ID NO: 26409 - DNA, 122 bp, Homo sapiens
  misc_feature (61)..(62): /note="This region represents a CpG dinucleotide"
  misc_feature (61)..(61): /note="Nucleotide may be methylated to form 5-methylcytosine"
tagcagtgtctaagctgtcttcatgagctgagtcagtccttgcaaaataggggagtcacacgaccagtcaagtcagttccttggctggggacatgggccactgacccacatggtgtcagctg

SEQ ID NO: 26410 - DNA, 122 bp, Homo sapiens
  misc_feature (61)..(62): /note="This region represents a CpG dinucleotide"
  misc_feature (61)..(61): /note="Nucleotide may be methylated to form 5-methylcytosine"
ctccatccgctctcacgcctcctgcaggatctgggagtgagggtggagagtctttcctcacgctccagcacagtggccaggaaaagaaatactgaatttgccccagccaacaggacgttctt

SEQ ID NO: 26411 - DNA, 122 bp, Homo sapiens
  misc_feature (61)..(62): /note="This region represents a CpG dinucleotide"
  misc_feature (61)..(61): /note="Nucleotide may be methylated to form 5-methylcytosine"
tgagtcattctcaaatcatttagttttaacattttcagagatagcatttttttaaatatgcgcttttattttggttggacagtcagttcactttttgcagggatacttttatacaatgttgt

SEQ ID NO: 26412 - DNA, 122 bp, Homo sapiens
  misc_feature (61)..(62): /note="This region represents a CpG dinucleotide"
  misc_feature (61)..(61): /note="Nucleotide may be methylated to form 5-methylcytosine"
gtgagaaggtaaatatcagccttccagaatgtgctcatagtagattacggaattagtccacgtgggagcttgcaggctactaagacggagctgcgcttggcccggcgatggggcaagcctgc

SEQ ID NO: 26413 - DNA, 122 bp, Homo sapiens
  misc_feature (61)..(62): /note="This region represents a CpG dinucleotide"
  misc_feature (61)..(61): /note="Nucleotide may be methylated to form 5-methylcytosine"
tgttaattggtatcaacagttacatgcagctagtggctggcactgggcagtgcagtcctacgtcacagttataagaagtcctataaacaccaagctgaacaaataaaagatcacacctagac

SEQ ID NO: 26414 - DNA, 122 bp, Homo sapiens
  misc_feature (61)..(62): /note="This region represents a CpG dinucleotide"
  misc_feature (61)..(61): /note="Nucleotide may be methylated to form 5-methylcytosine"
ccagcggtctgccttcttgagagttctgtttgggttcctcattctccccttccccttcatcgcccacagcctctggggctgacctcagtggatgatgacaggcaggagagctgagtgccagt

SEQ ID NO: 26415 - DNA, 122 bp, Homo sapiens
  misc_feature (61)..(62): /note="This region represents a CpG dinucleotide"
  misc_feature (61)..(61): /note="Nucleotide may be methylated to form 5-methylcytosine"
atttgaggagaatcttctcctcatgttgaatcttctaatccatagcaagatatttattgccgtttatctaggtattttttctttcattagcattttgtagattttagcatagaagttctaca

SEQ ID NO: 26416 - DNA, 122 bp, Homo sapiens
  misc_feature (61)..(62): /note="This region represents a CpG dinucleotide"
  misc_feature (61)..(61): /note="Nucleotide may be methylated to form 5-methylcytosine"
tgaggagtctgaagaaagtagttgccaaaaagaactatacaatagtgaagccaagactgacgacaaacttttcctacatttgccaagagaggatgttgatcccaatcggtgcagtcccttta

SEQ ID NO: 26417 - DNA, 122 bp, Homo sapiens
  misc_feature (61)..(62): /note="This region represents a CpG dinucleotide"
  misc_feature (61)..(61): /note="Nucleotide may be methylated to form 5-methylcytosine"
actacagtgattggtagacagtttggtctgtggtgaactttttttttcctcttcagcttgcggaaggagctaatgctgcttatttgcagttgttgaacctgtttgcctatgggacataccca

SEQ ID NO: 26418 - DNA, 122 bp, Homo sapiens
  misc_feature (61)..(62): /note="This region represents a CpG dinucleotide"
  misc_feature (61)..(61): /note="Nucleotide may be methylated to form 5-methylcytosine"
ccagagtgaacttctgtcatcatcacagagcctgtaatcttctgtatggctcagaggacccgccatgatttgtccctacttgcttctccagcctcctgtctcacttctctcctatccctggg

SEQ ID NO: 26419 - DNA, 122 bp, Homo sapiens
  misc_feature (61)..(62): /note="This region represents a CpG dinucleotide"
  misc_feature (61)..(61): /note="Nucleotide may be methylated to form 5-methylcytosine"
ctctgtgaggcttccatttaatgtaaatcttgaaggaaaaacagacatctgtctggggcacgcaaacacacaagacaaggggttgatgtgagccagtgggtgccgcactattatgattcctt

SEQ ID NO: 26420 - DNA, 122 bp, Homo sapiens
  misc_feature (61)..(62): /note="This region represents a CpG dinucleotide"
  misc_feature (61)..(61): /note="Nucleotide may be methylated to form 5-methylcytosine"
attagtctttacacaatccactgacatggacagctataaaagttacacttgctgctctagcgctgactagacaaatttgtagtgattagcacattacctgaactatcattccaagtttgtct

SEQ ID NO: 26421 - DNA, 122 bp, Homo sapiens
  misc_feature (61)..(62): /note="This region represents a CpG dinucleotide"
  misc_feature (61)..(61): /note="Nucleotide may be methylated to form 5-methylcytosine"
gggtcagtgtcagcagagtcggaggcctgagtcacttcctgacccttgctcaagagcatccggagctacagccagagtggccactcgtgctctcagaagatcgcacccacttgggcgatgag

SEQ ID NO: 26422 - DNA, 122 bp, Homo sapiens
  misc_feature (61)..(62): /note="This region represents a CpG dinucleotide"
  misc_feature (61)..(61): /note="Nucleotide may be methylated to form 5-methylcytosine"
acactttatggctaattatgtacttttttcattcaaccatctgtcttccttccatgtcagcgcatagagaacttcctctttttttttttttttgacggagtctcgctctgtcgcccaggctg

SEQ ID NO: 26423 - DNA, 122 bp, Homo sapiens
  misc_feature (61)..(62): /note="This region represents a CpG dinucleotide"
  misc_feature (61)..(61): /note="Nucleotide may be methylated to form 5-methylcytosine"
ctgggttaatgacgccacctggtggctggtgtcggggtgggcgagtcccctgcatttttgcgcttcagttctagaatcaggagtccgtcagcaaacaaagaggaaatgtataatcagggcca

SEQ ID NO: 26424 - DNA, 122 bp, Homo sapiens
  misc_feature (61)..(62): /note="This region represents a CpG dinucleotide"
  misc_feature (61)..(61): /note="Nucleotide may be methylated to form 5-methylcytosine"
acctgtctccccacatcctgggcttctttccatcctgtccaattcttgcctaaatcatagcgaaggtgagggaagggagggctctctgcagagctggtgtgggatggggaggagctgctgtg

SEQ ID NO: 26425 - DNA, 122 bp, Homo sapiens
  misc_feature (61)..(62): /note="This region represents a CpG dinucleotide"
  misc_feature (61)..(61): /note="Nucleotide may be methylated to form 5-methylcytosine"
ctgggtttaaggaaggattctgtagcctaaacccatgacaaatgagaggcggcaatgactcgtgagtagctaagactggattgatctctgttgttttgaatattggacttattttctaagat

SEQ ID NO: 26426 - DNA, 122 bp, Homo sapiens
  misc_feature (61)..(62): /note="This region represents a CpG dinucleotide"
  misc_feature (61)..(61): /note="Nucleotide may be methylated to form 5-methylcytosine"
gggagaagaaacatgacagtgatgaaaagaaaacaaggtccgtggctggtgacaaccagacgttaccaacagcagcatcaggaggtttctgttcgatggatggttcattttcatccaagaat

SEQ ID NO: 26427 - DNA, 122 bp, Homo sapiens
  misc_feature (61)..(62): /note="This region represents a CpG dinucleotide"
  misc_feature (61)..(61): /note="Nucleotide may be methylated to form 5-methylcytosine"
catttcttagcaaatttaccatgatcagagtctggccttaactgaccaggaagaggactccgtcattcatgcagagatgaaaatacttattagtaatcaactgatgctgatccaatgcagaa

SEQ ID NO: 26428 - DNA, 122 bp, Homo sapiens
  misc_feature (61)..(62): /note="This region represents a CpG dinucleotide"
  misc_feature (61)..(61): /note="Nucleotide may be methylated to form 5-methylcytosine"
ttcaaattgtcgccaagcccattaggctacctgaactgtctcagaaagtgcgggtggctgcgtcgaacggtggtggctcagaggaagagattggggccggcagcgacctaggtacctcactc

SEQ ID NO: 26429 - DNA, 122 bp, Homo sapiens
  misc_feature (61)..(62): /note="This region represents a CpG dinucleotide"
  misc_feature (61)..(61): /note="Nucleotide may be methylated to form 5-methylcytosine"
acatctggctgaggcccagggaaaagatatccctgctgagggtcacatggggagctgggacgcagaggacccaaagctgccacctcccaggccaggacagtgctcaagaagtcaggttcttg

SEQ ID NO: 26430 - DNA, 122 bp, Homo sapiens
  misc_feature (61)..(62): /note="This region represents a CpG dinucleotide"
  misc_feature (61)..(61): /note="Nucleotide may be methylated to form 5-methylcytosine"
gagctggcaaatagctttgcatgtctgccacaagcatgaaaacaagtaaggccagtcaaccgtagttgtgctagaatcgaaatatgaatatgattcatcagtgtattgatgggtccaggaag

SEQ ID NO: 26431 - DNA, 122 bp, Homo sapiens
  misc_feature (61)..(62): /note="This region represents a CpG dinucleotide"
  misc_feature (61)..(61): /note="Nucleotide may be methylated to form 5-methylcytosine"
atgcacttcaagtcctgtgtatcccacaaagacttgctcctttctaaaggctatggttcacgttcaacagaatagcagcaaccgccataagcctgagggctggctagtctttaatattctgc

SEQ ID NO: 26432 - DNA, 122 bp, Homo sapiens
  misc_feature (61)..(62): /note="This region represents a CpG dinucleotide"
  misc_feature (61)..(61): /note="Nucleotide may be methylated to form 5-methylcytosine"
aaagagcaagtcaatgagaacctgctgggcaggcatggaatctgactcaggagtcactggcgtggcactggtgcagggtgtgaggatcagacacagggtcctccactgccacaggccaggcc

SEQ ID NO: 26433 - DNA, 122 bp, Homo sapiens
  misc_feature (61)..(62): /note="This region represents a CpG dinucleotide"
  misc_feature (61)..(61): /note="Nucleotide may be methylated to form 5-methylcytosine"
atgtatcaggaactttgcaacagaacaactaataacatcttaagctccatttgtctagctcgctagtcctcttggcagaggtcataccagcagtggttttgttgatttgctgcatcaaatgt

SEQ ID NO: 26434 - DNA, 122 bp, Homo sapiens
  misc_feature (61)..(62): /note="This region represents a CpG dinucleotide"
  misc_feature (61)..(61): /note="Nucleotide may be methylated to form 5-methylcytosine"
tgctgcccagaggaggagccattggccagcttggctctataatcaagaacagagagtctccgccaggcactgtggctcatacctgtaatcccagcactttgggaggccgaggcagatgaatc

SEQ ID NO: 26435 - DNA, 122 bp, Homo sapiens
  misc_feature (61)..(62): /note="This region represents a CpG dinucleotide"
  misc_feature (61)..(61): /note="Nucleotide may be methylated to form 5-methylcytosine"
gtgcttaggtctggaagggccagtggagtacgcagtgaggaaggaggatctggcccagcacgcctgggaaatgacacttcaggctttatcagaagctaactgggtcaccagtgtgatggggg

SEQ ID NO: 26436 - DNA, 122 bp, Homo sapiens
  misc_feature (61)..(62): /note="This region represents a CpG dinucleotide"
  misc_feature (61)..(61): /note="Nucleotide may be methylated to form 5-methylcytosine"
tgaaaaacagaaatcagatagaaatgaaaagccctgtcactttcaaggtgctatgtagtacgaccagccataagcttctgtgtcattcaggatttaagacagctgcaatgttactactcaac

SEQ ID NO: 26437 - DNA, 122 bp, Homo sapiens
  misc_feature (61)..(62): /note="This region represents a CpG dinucleotide"
  misc_feature (61)..(61): /note="Nucleotide may be methylated to form 5-methylcytosine"
agctgcctgatgaattttatccacctccatttcagcatgtggctcgcgtggacaggtggacggacgctgtggccgcatggaaccttgagaacccagggacgagccagtgccgggaaggaact

SEQ ID NO: 26438 - DNA, 122 bp, Homo sapiens
  misc_feature (61)..(62): /note="This region represents a CpG dinucleotide"
  misc_feature (61)..(61): /note="Nucleotide may be methylated to form 5-methylcytosine"
tacaagaaatacaagctgggtttgactgaatgacaaaaagaaatctgttgagccaggaagcgtagtaaataccgtgactctctgcaaatgcgcacagcccaaacagctttttccagtctgga

SEQ ID NO: 26439 - DNA, 122 bp, Homo sapiens
  misc_feature (61)..(62): /note="This region represents a CpG dinucleotide"
  misc_feature (61)..(61): /note="Nucleotide may be methylated to form 5-methylcytosine"
acacaggcaggagcttttctcttccttctgctgttaagcaggattcctcccaagcccagacgtctctggatcatctctggatgttagctggaagttggacctcagctgcaaggtcattatca

SEQ ID NO: 26440 - DNA, 122 bp, Homo sapiens
  misc_feature (61)..(62): /note="This region represents a CpG dinucleotide"
  misc_feature (61)..(61): /note="Nucleotide may be methylated to form 5-methylcytosine"
ctctggaggagtagtgtcagctatgttttgtgggagacagaatcctggctgctctctggccggttcaaagggtgtttgtctgcatgttcttcatttctatactctgctaacacagagggctc

SEQ ID NO: 26441 - DNA, 122 bp, Homo sapiens
  misc_feature (61)..(62): /note="This region represents a CpG dinucleotide"
  misc_feature (61)..(61): /note="Nucleotide may be methylated to form 5-methylcytosine"
ttttctggtacaaaggtccaggcatcatttagcagaaacctatgctcaccccaatcacgacgattagtttgccctcagtgtaactgacgatctttggccatggaaagtgtgctgagggagct

SEQ ID NO: 26442 - DNA, 122 bp, Homo sapiens
  misc_feature (61)..(62): /note="This region represents a CpG dinucleotide"
  misc_feature (61)..(61): /note="Nucleotide may be methylated to form 5-methylcytosine"
gcagtgcccagcgtgttgacacccgggagatggcaaaggggatgatgatttctgcagggacgtagaactgcagggcataggtgcacaggatgccggcaatgtagagaagcttgacagactgg

SEQ ID NO: 26443 - DNA, 122 bp, Homo sapiens
  misc_feature (61)..(62): /note="This region represents a CpG dinucleotide"
  misc_feature (61)..(61): /note="Nucleotide may be methylated to form 5-methylcytosine"
aatgcaatttcccccatctagaaatgtaaccctcagccagttgccttgaaagctggttaccgtggagatgattatcagtattatgatgacctatttagaagaatttctgcatcaccagaaaa

SEQ ID NO: 26444 - DNA, 122 bp, Homo sapiens
  misc_feature (61)..(62): /note="This region represents a CpG dinucleotide"
  misc_feature (61)..(61): /note="Nucleotide may be methylated to form 5-methylcytosine"
aagatagggtttagttgtctcagtttgcactgtcagcataagcaaagaccttcccttattcgctttgaaaaaaaaaccttatttttagagtaagggaaggaaacatgtctgttgagaaaacc

SEQ ID NO: 26445 - DNA, 122 bp, Homo sapiens
  misc_feature (61)..(62): /note="This region represents a CpG dinucleotide"
  misc_feature (61)..(61): /note="Nucleotide may be methylated to form 5-methylcytosine"
ctggtcagctctgagtcattcccttatcaggcactgatgaggaggcctgctccttgttagcgggaagggagattggccagatagttgccatgcacacaaagccccaataggcagctctgttt

SEQ ID NO: 26446 - DNA, 122 bp, Homo sapiens
  misc_feature (61)..(62): /note="This region represents a CpG dinucleotide"
  misc_feature (61)..(61): /note="Nucleotide may be methylated to form 5-methylcytosine"
gacagagtttgacttcatagcctttgaaatataactgcttgaatatacttgctattttaccgcagtttggctctgtctctctctctctctttgtgtgtgtgtgtatgtgtgaaagagaaaga

SEQ ID NO: 26447 - DNA, 122 bp, Homo sapiens
  misc_feature (61)..(62): /note="This region represents a CpG dinucleotide"
  misc_feature (61)..(61): /note="Nucleotide may be methylated to form 5-methylcytosine"
gtgattctcaccacagtcctgtgagctattgccatcacttccactttacataaggggaaacggaggcccagggaacttaagcagcttacccaacagcacctgtaaggggctgacagcgccag

SEQ ID NO: 26448 - DNA, 122 bp, Homo sapiens
  misc_feature (61)..(62): /note="This region represents a CpG dinucleotide"
  misc_feature (61)..(61): /note="Nucleotide may be methylated to form 5-methylcytosine"
ggtgcggaggctcaccagccacttagttgccatctctgtctacatgcatgatgatctaatcgtgcctgatgatggtctgtctgatgtaggtcctgacctcactgccacatcttagccacagc

SEQ ID NO: 26449 - DNA, 122 bp, Homo sapiens
  misc_feature (61)..(62): /note="This region represents a CpG dinucleotide"
  misc_feature (61)..(61): /note="Nucleotide may be methylated to form 5-methylcytosine"
tgagcctttatctgtccttggagggtgtccaaaacctactcacatccgcttgattctgtacgctagctcatccaggcagcctgagtccatggctattcaagaccaggagttaaaattgaatt

SEQ ID NO: 26450 - DNA, 122 bp, Homo sapiens
  misc_feature (61)..(62): /note="This region represents a CpG dinucleotide"
  misc_feature (61)..(61): /note="Nucleotide may be methylated to form 5-methylcytosine"
gacagcagcaggtcagtgagcagcaccagcccgccgagctcagcaggcagctcctccagccggttttccgacacgtccaggcacaccaggcgccgcaggttcccgagctcctgcaggtgggc

SEQ ID NO: 26451 - DNA, 122 bp, Homo sapiens
  misc_feature (61)..(62): /note="This region represents a CpG dinucleotide"
  misc_feature (61)..(61): /note="Nucleotide may be methylated to form 5-methylcytosine"
cagaggaagagataagctgccccttagggagctgattgtaatgcgttccagacgtctgcacgcccctggtgcaagcaccagctttctgttaaagactcagggttatgttgtttggatgtttt

SEQ ID NO: 26452 - DNA, 122 bp, Homo sapiens
  misc_feature (61)..(62): /note="This region represents a CpG dinucleotide"
  misc_feature (61)..(61): /note="Nucleotide may be methylated to form 5-methylcytosine"
gccagtcaagaatctcgaccagcgacggagccaagggcctgggcctcagattgttctggacgccagagcaggacagtcacagtcccccagctggaagcagcctagtgcatgctttatttgac

SEQ ID NO: 26453 - DNA, 122 bp, Homo sapiens
  misc_feature (61)..(62): /note="This region represents a CpG dinucleotide"
  misc_feature (61)..(61): /note="Nucleotide may be methylated to form 5-methylcytosine"
atctccctggctgacagcacagacctcaggtgaggcgagcagcaagcctgggctcctgagcgttagtcagagatgagatcagagcagggtgtgggaggctgtctgtgggtgtcattgctgtg

SEQ ID NO: 26454 - DNA, 122 bp, Homo sapiens
  misc_feature (61)..(62): /note="This region represents a CpG dinucleotide"
  misc_feature (61)..(61): /note="Nucleotide may be methylated to form 5-methylcytosine"
cagagttcttgtatgttcagtttgccttgttgacctggcttcccaaggtctgtccatctgcgcagcctcttctcatcctgtcaatctgctggcctatttcctgtttctgcagccggaccagg

SEQ ID NO: 26455 - DNA, 122 bp, Homo sapiens
  misc_feature (61)..(62): /note="This region represents a CpG dinucleotide"
  misc_feature (61)..(61): /note="Nucleotide may be methylated to form 5-methylcytosine"
ggcacaagccaaggaagaggggaaaggagaaacctgacggacacgtctgcgacaaatccccggggaaaatcccccccaggcacgtccctcaggaagccagtggagaaacgcttctcaggacc

SEQ ID NO: 26456 - DNA, 122 bp, Homo sapiens
  misc_feature (61)..(62): /note="This region represents a CpG dinucleotide"
  misc_feature (61)..(61): /note="Nucleotide may be methylated to form 5-methylcytosine"
caagcaggaagaaggtggtggggaagctcagctcgagcagcctgaccaagaggctgtgtccgcccggcccccctggctatatgggatgggctatgtggggtgggagggccgggtaccttggt

SEQ ID NO: 26457 - DNA, 122 bp, Homo sapiens
  misc_feature (61)..(62): /note="This region represents a CpG dinucleotide"
  misc_feature (61)..(61): /note="Nucleotide may be methylated to form 5-methylcytosine"
caatacaaggcttcttcattcccatgaaaaatgctgtctacaagaagtcaaacaaaggcacgtgaacctccaagccatcctgccacaacaaagtacatcctcatactcatgaggtgactttt

SEQ ID NO: 26458 - DNA, 122 bp, Homo sapiens
  misc_feature (61)..(62): /note="This region represents a CpG dinucleotide"
  misc_feature (61)..(61): /note="Nucleotide may be methylated to form 5-methylcytosine"
ataaacaacaaaaaaagctactcacggttgtgttgtgggtggctgggcactgggagctgccgggggctgaggagtcccagttgttttctgtcctctcccaggacctggccgtgggtgccact

SEQ ID NO: 26459 - DNA, 122 bp, Homo sapiens
  misc_feature (61)..(62): /note="This region represents a CpG dinucleotide"
  misc_feature (61)..(61): /note="Nucleotide may be methylated to form 5-methylcytosine"
gcaaggtggagttgcaccagctcacaagatggatagacagagctgggggaagtgtcccagcgggtttttgcagtctgtcagaggagctgcagctgtaaccacccatctgtgcatccttggct

SEQ ID NO: 26460 - DNA, 122 bp, Homo sapiens
  misc_feature (61)..(62): /note="This region represents a CpG dinucleotide"
  misc_feature (61)..(61): /note="Nucleotide may be methylated to form 5-methylcytosine"
tggtttttcagtggagccaactctattaagcaatggtattaagcagttttctgagggtagcgtctgccacagagtttggtgcactgtgtttatttgacatcaagttaacctattcttccttt

SEQ ID NO: 26461 - DNA, 122 bp, Homo sapiens
  misc_feature (61)..(62): /note="This region represents a CpG dinucleotide"
  misc_feature (61)..(61): /note="Nucleotide may be methylated to form 5-methylcytosine"
agcctggcgtggtggtgcatgcctgtagtcctagctacttaggaggctaagatgagagaccggcttgagccgaggaggcagatttcagtgagtcaagatcatatcactgcactccagcctgg

SEQ ID NO: 26462 - DNA, 122 bp, Homo sapiens
  misc_feature (61)..(62): /note="This region represents a CpG dinucleotide"
  misc_feature (61)..(61): /note="Nucleotide may be methylated to form 5-methylcytosine"
agagctgtgtgatccactccaatcttagaagtaaagttcaaactgcagctaatgttaaatcgtgccagagaaggtttacttattaactctgcttagagaagtgtgtgacccacacatttgaa

SEQ ID NO: 26463 - DNA, 122 bp, Homo sapiens
  misc_feature (61)..(62): /note="This region represents a CpG dinucleotide"
  misc_feature (61)..(61): /note="Nucleotide may be methylated to form 5-methylcytosine"
agcagcatacttctgtgttttataagctcccaggctgtggtgttttgccatagcagcctgcgtaaactaagatgcctgacaattacagatataatcacatctttctggaagcatagcctgca

SEQ ID NO: 26464 - DNA, 122 bp, Homo sapiens
  misc_feature (61)..(62): /note="This region represents a CpG dinucleotide"
  misc_feature (61)..(61): /note="Nucleotide may be methylated to form 5-methylcytosine"
aaaataggaaaaaaaaaattccacaaagtttcaaaaagcaaaacttcaatctgccctacacgaagcacttctttgaatccatgtgaatgaagtgatgtgtaggcctgtattatgtattctag

SEQ ID NO: 26465 - DNA, 122 bp, Homo sapiens
  misc_feature (61)..(62): /note="This region represents a CpG dinucleotide"
  misc_feature (61)..(61): /note="Nucleotide may be methylated to form 5-methylcytosine"
ctcactcccagtcctggaaaacatcccactttctgtattgttttcttacaaacattgagtcgaatctctgaattgataagctgcctagctgataacgaggctaaagtaaacccagcaacttt

SEQ ID NO: 26466 - DNA, 122 bp, Homo sapiens
  misc_feature (61)..(62): /note="This region represents a CpG dinucleotide"
  misc_feature (61)..(61): /note="Nucleotide may be methylated to form 5-methylcytosine"
aagcaagtgagaaaagaaaacagaacaggggtgaagggtgtggtggttgggagaaggaggcgtgggtgagaaaaatttcactgtagtaaacgtccatcataatcaaagagggcttatcttct

SEQ ID NO: 26467 - DNA, 122 bp, Homo sapiens
  misc_feature (61)..(62): /note="This region represents a CpG dinucleotide"
  misc_feature (61)..(61): /note="Nucleotide may be methylated to form 5-methylcytosine"
tgatcaacaagaactggatatgtccagtagccagaaatcactaatacattcctatccctccgtttttcttatttcctacatagctaacttcctgctccacaggcatcttaagaaaagtagac

SEQ ID NO: 26468 - DNA, 122 bp, Homo sapiens
  misc_feature (61)..(62): /note="This region represents a CpG dinucleotide"
  misc_feature (61)..(61): /note="Nucleotide may be methylated to form 5-methylcytosine"
aaagagaagagataagatattttgaaagacaagagataatatatttttaagaaagcaattcgagtaagattgtgaaatgtatacattactgattacagtgaagccagaaaaatttggcagag

SEQ ID NO: 26469 - DNA, 122 bp, Homo sapiens
  misc_feature (61)..(62): /note="This region represents a CpG dinucleotide"
  misc_feature (61)..(61): /note="Nucleotide may be methylated to form 5-methylcytosine"
ggctaaagataagctcaatagatctgtgggagcacagctttaagccatgtggctttactgcgtcaggaaaccacagtgggagcttgtcaaccctgttacccatctggatgggacgggttcta

SEQ ID NO: 26470 - DNA, 122 bp, Homo sapiens
  misc_feature (61)..(62): /note="This region represents a CpG dinucleotide"
  misc_feature (61)..(61): /note="Nucleotide may be methylated to form 5-methylcytosine"
cacagccccacaggcctctcagaaccttgcatcagagtcgcccttgacctcaaccctgcccgagaaggaagtgctggtgcaaccccagcccagctgcaggaagtggtacctgtcaccaagtc

SEQ ID NO: 26471 - DNA, 122 bp, Homo sapiens
  misc_feature (61)..(62): /note="This region represents a CpG dinucleotide"
  misc_feature (61)..(61): /note="Nucleotide may be methylated to form 5-methylcytosine"
aaggggccgtctgagatgtttagctctttaaaaatagccataatactcataaagctggcccgtcactgggttaaatgactcaaaaccacatgactcatttgtgttcacgtagatttgagggt

SEQ ID NO: 26472 - DNA, 122 bp, Homo sapiens
  misc_feature (61)..(62): /note="This region represents a CpG dinucleotide"
  misc_feature (61)..(61): /note="Nucleotide may be methylated to form 5-methylcytosine"
tatcaaaggttaaacccacacagtggccagttaatttcacactaaagaaaaacttctggtcgggtgaggtggctcacgcctgtaatcccagcattttgggaggcttaggcgggcagatcact

SEQ ID NO: 26473 - DNA, 122 bp, Homo sapiens
  misc_feature (61)..(62): /note="This region represents a CpG dinucleotide"
  misc_feature (61)..(61): /note="Nucleotide may be methylated to form 5-methylcytosine"
tatcatgagagagtgacagtcagggtgaggcatgccagctactgcaatgagcaagctcaccgtgtctgtgtgtgcaacaaccacccaacactatgtattccagatgcctctccctctggtcc

SEQ ID NO: 26474 - DNA, 122 bp, Homo sapiens
  misc_feature (61)..(62): /note="This region represents a CpG dinucleotide"
  misc_feature (61)..(61): /note="Nucleotide may be methylated to form 5-methylcytosine"
gaggaccaaaggctctttatcttcagtgggcatttcccagcagaaatctgaggtctagagcgagacagagtagaattgacaataagatccacacttgagctgctagctgccttgatgggaga

SEQ ID NO: 26475 - DNA, 122 bp, Homo sapiens
  misc_feature (61)..(62): /note="This region represents a CpG dinucleotide"
  misc_feature (61)..(61): /note="Nucleotide may be methylated to form 5-methylcytosine"
gtttcattgtctgagcttgcaagtgcttactgtgtaaactacttgctaaacatttgttggcgatgagaagcaaaaccacttggggactgggcatttgctgcctcttgtcagcatcccctctt

SEQ ID NO: 26476 - DNA, 122 bp, Homo sapiens
  misc_feature (61)..(62): /note="This region represents a CpG dinucleotide"
  misc_feature (61)..(61): /note="Nucleotide may be methylated to form 5-methylcytosine"
acgtggtgcaaaagacaggcatgtgggctctgctgccttctagctgggcgaccttgggcacgtcatttaaccctcctatgcctgagtttcttcatccgaaaatcagggcttctgtgaagatt

SEQ ID NO: 26477 - DNA, 122 bp, Homo sapiens
  misc_feature (61)..(62): /note="This region represents a CpG dinucleotide"
  misc_feature (61)..(61): /note="Nucleotide may be methylated to form 5-methylcytosine"
atatcctgtttctctgacacataaccctgccctgcggtggtgtggtttcaaggtccagagcgcagggtgagcaaggggcttagtaagtgccctgaagctagcactcacttcctcccacagag

SEQ ID NO: 26478 - DNA, 122 bp, Homo sapiens
  misc_feature (61)..(62): /note="This region represents a CpG dinucleotide"
  misc_feature (61)..(61): /note="Nucleotide may be methylated to form 5-methylcytosine"
ataatcaactatgctaagttctagaagcagttataaaattttagatgaatgaaatagttgcgtcacacacagattcttggaagtgtttgaatcgcatgagtattgtttgaactgcataatag

SEQ ID NO: 26479 - DNA, 122 bp, Homo sapiens
  misc_feature (61)..(62): /note="This region represents a CpG dinucleotide"
  misc_feature (61)..(61): /note="Nucleotide may be methylated to form 5-methylcytosine"
taagcatgagctggccaagtgcatgatgacagacacatggcccagccacccctccacccccgcctgtggccagccatcccccaggcacatgtgtgaagggcctcaggctgccccagcagctg

SEQ ID NO: 26480 - DNA, 122 bp, Homo sapiens
  misc_feature (61)..(62): /note="This region represents a CpG dinucleotide"
  misc_feature (61)..(61): /note="Nucleotide may be methylated to form 5-methylcytosine"
tagtagctaagtcaatggagagtgagatgatttttacctacgttagaaggggaacaagaacgtttgagaaaaggaaacaatatgtgtatgttctgtgcaataggctgaatactagaaaagga

SEQ ID NO: 26481 - DNA, 122 bp, Homo sapiens
  misc_feature (61)..(62): /note="This region represents a CpG dinucleotide"
  misc_feature (61)..(61): /note="Nucleotide may be methylated to form 5-methylcytosine"
taggtgtgtttatgtgactaatacttactggtggaacatgagtaaaagcgacatttcactcgcagtccagggcagtgcaaagtgggtggaatttctatatttttgctcttcctctttctccc

SEQ ID NO: 26482 - DNA, 122 bp, Homo sapiens
  misc_feature (61)..(62): /note="This region represents a CpG dinucleotide"
  misc_feature (61)..(61): /note="Nucleotide may be methylated to form 5-methylcytosine"
gcccggacgatctgacttactttttaaagcatccccctgtctgctgtgtggggaatggcccgtccatcagaattctcttgcggtgattacgtaggtgcagatgtaccgctaacctcactccc

SEQ ID NO: 26483 - DNA, 122 bp, Homo sapiens
  misc_feature (61)..(62): /note="This region represents a CpG dinucleotide"
  misc_feature (61)..(61): /note="Nucleotide may be methylated to form 5-methylcytosine"
tccagctcattttcctggttcccggagcttcaagacagacattgttttccaggccccgctcgcccggatgaatcacctcccggccactgcttcccaggcgtcatgtgctcccggggacggca

SEQ ID NO: 26484 - DNA, 122 bp, Homo sapiens
  misc_feature (61)..(62): /note="This region represents a CpG dinucleotide"
  misc_feature (61)..(61): /note="Nucleotide may be methylated to form 5-methylcytosine"
ccagccgacatttgtggccgagctgggccaggagggactcgggtccacaaacctagaagacgactgcagggaggcccagtcacgctaccgccgcttcggcagcggagcctagcctgcccccc

SEQ ID NO: 26485 - DNA, 122 bp, Homo sapiens
  misc_feature (61)..(62): /note="This region represents a CpG dinucleotide"
  misc_feature (61)..(61): /note="Nucleotide may be methylated to form 5-methylcytosine"
accctgaaagttattggcaaagagtaactggcagagcagagattccaacccaggcaatctcgctacagaggtggactttacctcttcatggcattctgaggcggctcctgcaatgaataata

SEQ ID NO: 26486 - DNA, 122 bp, Homo sapiens
  misc_feature (61)..(62): /note="This region represents a CpG dinucleotide"
  misc_feature (61)..(61): /note="Nucleotide may be methylated to form 5-methylcytosine"
gtggctgctttgtccactagcatgccttaaatcagtatttgatgactaaatgaatgacagcgagagagcaagtaagcagaggagcaggaatcaacacagtccatacttccccacgttgccag

SEQ ID NO: 26487 - DNA, 122 bp, Homo sapiens
  misc_feature (61)..(62): /note="This region represents a CpG dinucleotide"
  misc_feature (61)..(61): /note="Nucleotide may be methylated to form 5-methylcytosine"
catgccaggcagtcagggatcctgctcctgtttcctcagagggtgagcagttccatccaccgcttcttgctttgtcaaatgggtaatcctggcagctgccaggctcattgctatttgcaact

SEQ ID NO: 26488 - DNA, 122 bp, Homo sapiens
  misc_feature (61)..(62): /note="This region represents a CpG dinucleotide"
  misc_feature (61)..(61): /note="Nucleotide may be methylated to form 5-methylcytosine"
agaactggaggataaagccagatgggtacaagtgaagtgggtcactgtcaagaatcatcacgttttctggaattcgatgttttcaaattgcataatcctccttgttctcaattatcctccac

SEQ ID NO: 26489 - DNA, 122 bp, Homo sapiens
  misc_feature (61)..(62): /note="This region represents a CpG dinucleotide"
  misc_feature (61)..(61): /note="Nucleotide may be methylated to form 5-methylcytosine"
ctttacctggctctcttcaggtctgaaagagtcaccatcctggcactcttataagacaatcgtgactcagaggcaaaggctggggagctctgctaggaaataatcatggtataacaaaattc

SEQ ID NO: 26490 - DNA, 122 bp, Homo sapiens
  misc_feature (61)..(62): /note="This region represents a CpG dinucleotide"
  misc_feature (61)..(61): /note="Nucleotide may be methylated to form 5-methylcytosine"
ggaaggagcccaagagagtcttgtgttttaagtggcctggtttgtcacgtgtcaagtccccgcctacaacaacagcatgttgacactcggtattctgaggggagagattatgtgcattatta

SEQ ID NO: 26491 - DNA, 122 bp, Homo sapiens
  misc_feature (61)..(62): /note="This region represents a CpG dinucleotide"
  misc_feature (61)..(61): /note="Nucleotide may be methylated to form 5-methylcytosine"
tgcagctcctcactctgggccccaggctgatggaacgatcatgtcaaatgttgaggtcatcgtggcagagggagagagtcctggaggatactgcacctgcaattaggtgctctgatctggaa

SEQ ID NO: 26492 - DNA, 122 bp, Homo sapiens
  misc_feature (61)..(62): /note="This region represents a CpG dinucleotide"
  misc_feature (61)..(61): /note="Nucleotide may be methylated to form 5-methylcytosine"
aggcgtgagccaccacgcccaactgcattacctactttgaggctatttctacagaatttgcggaggttgggttatgattaatttaagacttatacagtgttaagaaatttgtggtcactgca

SEQ ID NO: 26493 - DNA, 122 bp, Homo sapiens
  misc_feature (61)..(62): /note="This region represents a CpG dinucleotide"
  misc_feature (61)..(61): /note="Nucleotide may be methylated to form 5-methylcytosine"
atgacatcatcacgagagaaaacagcagcccgcagcctgaggagtggcagcagctggcaacggctagccttgtgaagctggggcggggtgggaggcagggcagcggcttctattttaagccg

SEQ ID NO: 26494 - DNA, 122 bp, Homo sapiens
  misc_feature (61)..(62): /note="This region represents a CpG dinucleotide"
  misc_feature (61)..(61): /note="Nucleotide may be methylated to form 5-methylcytosine"
agaacacagagggcaggaacagctgtggcctcgggccagatacctgcattctgtgtgaggcggttaaatgctgacaaggtgtggattgactgtgacaagttagagttgcccgtggtgaaacc

SEQ ID NO: 26495 - DNA, 122 bp, Homo sapiens
  misc_feature (61)..(62): /note="This region represents a CpG dinucleotide"
  misc_feature (61)..(61): /note="Nucleotide may be methylated to form 5-methylcytosine"
agtgaaatactgcacaggatcccccaaggcacgaagctggctggagggagctggagggagcgccccacctgccgcgggaaactcacgaggaaagtgcagaccttcggtggcgctggcacccg

SEQ ID NO: 26496 - DNA, 122 bp, Homo sapiens
  misc_feature (61)..(62): /note="This region represents a CpG dinucleotide"
  misc_feature (61)..(61): /note="Nucleotide may be methylated to form 5-methylcytosine"
gtagttcccaaccccttgtctagacaaccaatgagacaataaatccagcctgatttgtagcgtttgtttacaaatcagttgctgtggctatttcaagctaacaatgcaaagtcactgcacga

SEQ ID NO: 26497 - DNA, 122 bp, Homo sapiens
  misc_feature (61)..(62): /note="This region represents a CpG dinucleotide"
  misc_feature (61)..(61): /note="Nucleotide may be methylated to form 5-methylcytosine"
tggggtctggatgcctggtgtggcctcatgcagactctctgggcaggtaccacagtatgacgcgacagctgctccgcaaggctgacggggtggtgctcatgtacgacatcacctcccaggag

SEQ ID NO: 26498 - DNA, 122 bp, Homo sapiens
  misc_feature (61)..(62): /note="This region represents a CpG dinucleotide"
  misc_feature (61)..(61): /note="Nucleotide may be methylated to form 5-methylcytosine"
tgttctgtttctattcctgtttccttcactgcttctactcttttcttcttttcttagaggcgggttcttgctttgttgcccaggctggtggtgcaatcatatagctcaccgcagcctcaaac

SEQ ID NO: 26499 - DNA, 122 bp, Homo sapiens
  misc_feature (61)..(62): /note="This region represents a CpG dinucleotide"
  misc_feature (61)..(61): /note="Nucleotide may be methylated to form 5-methylcytosine"
gctgcccaggaggcacactgatctcacacttaatttctccagttttattatttgctctggcggcattttctcttgttagagaaatctgggagcttgaggccaggccctcataattactacaa

SEQ ID NO: 26500 - DNA, 122 bp, Homo sapiens
  misc_feature (61)..(62): /note="This region represents a CpG dinucleotide"
  misc_feature (61)..(61): /note="Nucleotide may be methylated to form 5-methylcytosine"
tgcaaggtcactgactcacccttaacccttcttgtaacatgtcttcttaggcaatcctatcggacagaacccaggataagtcatgcataatttaaagaaatttcataggaattaaaagagat

SEQ ID NO: 26501 - DNA, 122 bp, Homo sapiens
  misc_feature (61)..(62): /note="This region represents a CpG dinucleotide"
  misc_feature (61)..(61): /note="Nucleotide may be methylated to form 5-methylcytosine"
gatccatcacagtgatacatgctcacatatgtcacagtgagatgcagacccgctgcttcacgctattcctggctcctgggagtagcaggttgtctaagcaccttgatgccatggtgatagac

SEQ ID NO: 26502 - DNA, 122 bp, Homo sapiens
  misc_feature (61)..(62): /note="This region represents a CpG dinucleotide"
  misc_feature (61)..(61): /note="Nucleotide may be methylated to form 5-methylcytosine"
cttactgtgatcctgggcagcactgctatttctcctgtcagggcacagtccacacagctccgtaatcatcactcactctctggttgccccgactggtcgggggggctctgtgagggccatgg

SEQ ID NO: 26503 - DNA, 122 bp, Homo sapiens
  misc_feature (61)..(62): /note="This region represents a CpG dinucleotide"
  misc_feature (61)..(61): /note="Nucleotide may be methylated to form 5-methylcytosine"
gtctgatcttttcatctggaaggcacacatacatgtttgttgacaaatgaatgagaaacgcggctattggattaacatggtatttatatgctttactgaaactgccctaatggaatcaaata

SEQ ID NO: 26504 - DNA, 122 bp, Homo sapiens
  misc_feature (61)..(62): /note="This region represents a CpG dinucleotide"
  misc_feature (61)..(61): /note="Nucleotide may be methylated to form 5-methylcytosine"
gaagcagctgtggatgaggatgatgaggatgaggaagaaggggaggaagtggtggaggaccgagattactactatgacaccttcaaaggagatgactacaatgaggagaatcctactgaacc

SEQ ID NO: 26505 - DNA, 122 bp, Homo sapiens
  misc_feature (61)..(62): /note="This region represents a CpG dinucleotide"
  misc_feature (61)..(61): /note="Nucleotide may be methylated to form 5-methylcytosine"
cagtcactctgctcttcagaggagccagtgcaggaaaggaggccctgcaggtctggtccccgccagaacactcaaccagcctgtggactggcaggatctgaactcaggcctgccgggtccca

SEQ ID NO: 26506 - DNA, 122 bp, Homo sapiens
  misc_feature (61)..(62): /note="This region represents a CpG dinucleotide"
  misc_feature (61)..(61): /note="Nucleotide may be methylated to form 5-methylcytosine"
agtttgtgcttgtctgactacatggtcttaaaaccaaggtccttgtcttgaatacacaaccgtcaccacacaaagtccaagactgccaggtcattgctcatcaccagatggctctgtaaatc

SEQ ID NO: 26507 - DNA, 122 bp, Homo sapiens
  misc_feature (61)..(62): /note="This region represents a CpG dinucleotide"
  misc_feature (61)..(61): /note="Nucleotide may be methylated to form 5-methylcytosine"
acctcaggtgatccacctgccttagcctcccaaagtgctgggattagaggcgtgagccaccgcacccgtcccagaacaaaggctttgagagtctgggactgtccacctggcagctgggcctg

SEQ ID NO: 26508 - DNA, 122 bp, Homo sapiens
  misc_feature (61)..(62): /note="This region represents a CpG dinucleotide"
  misc_feature (61)..(61): /note="Nucleotide may be methylated to form 5-methylcytosine"
gacaaacccctagtgagtgagcgcgtcccagggatgaaacacccgaccttctcaacgttgcgcccaatcaggcttgcaaccacattgccctggtatcactgagccccgaatttgtcgacagc

SEQ ID NO: 26509 - DNA, 122 bp, Homo sapiens
  misc_feature (61)..(62): /note="This region represents a CpG dinucleotide"
  misc_feature (61)..(61): /note="Nucleotide may be methylated to form 5-methylcytosine"
acaagtgtgagccactgtgcctagcctggaaagtcttaacccataggaacttactgatcacgaatgaattcattaagattaccatatggcgaatataagagttaatacctgagacttcactt

SEQ ID NO: 26510 - DNA, 122 bp, Homo sapiens
  misc_feature (61)..(62): /note="This region represents a CpG dinucleotide"
  misc_feature (61)..(61): /note="Nucleotide may be methylated to form 5-methylcytosine"
ttgccctgtggagtctcctacattctagattttttgctgattgtgtctcctttgtattagcgtgtttcctgtcacatatttctcatagactggtagttcagtttagaggtttgatcactttc

SEQ ID NO: 26511 - DNA, 122 bp, Homo sapiens
  misc_feature (61)..(62): /note="This region represents a CpG dinucleotide"
  misc_feature (61)..(61): /note="Nucleotide may be methylated to form 5-methylcytosine"
tctcttttacagatacatatgaaatatgtttctatacacaatataagacatcatttgaaccggtgttcctgtctaagactatacttccctaggccttctacctacatcagtttggggccaag

SEQ ID NO: 26512 - DNA, 122 bp, Homo sapiens
  misc_feature (61)..(62): /note="This region represents a CpG dinucleotide"
  misc_feature (61)..(61): /note="Nucleotide may be methylated to form 5-methylcytosine"
gagaccctattatttaaaaaaaaaaaaaatggtctcgagacctgtcaattccccacactacgttgtctggccacctcctgggatgtgatacatgaataaataaatggtgttagccacaaagt

SEQ ID NO: 26513 - DNA, 122 bp, Homo sapiens
  misc_feature (61)..(62): /note="This region represents a CpG dinucleotide"
  misc_feature (61)..(61): /note="Nucleotide may be methylated to form 5-methylcytosine"
aggcctatctttctttcctagaggtcaataagcaccccaactaaagataagcatcagaatcgcctggagaattttgctcctaaggaccccacccagacctacccaatcagaatgggggttga

SEQ ID NO: 26514 - DNA, 122 bp, Homo sapiens
  misc_feature (61)..(62): /note="This region represents a CpG dinucleotide"
  misc_feature (61)..(61): /note="Nucleotide may be methylated to form 5-methylcytosine"
gttgccacctggcccatctgtagagtggcccaaatctggtttttgcctcctctagcaagacgggtttggtgtgctaggtgattctgacacacaccaggtccccgccttcctccagcagcctg

SEQ ID NO: 26515 - DNA, 122 bp, Homo sapiens
  misc_feature (61)..(62): /note="This region represents a CpG dinucleotide"
  misc_feature (61)..(61): /note="Nucleotide may be methylated to form 5-methylcytosine"
ccacatggccttttatgacttaacctcagaaatcaagctgggtgcggtgactgctggatgcggtggctcaagcctgtaatcccagccctttgagaggctgagttgggcggatcatttgagac

SEQ ID NO: 26516 - DNA, 122 bp, Homo sapiens
  misc_feature (61)..(62): /note="This region represents a CpG dinucleotide"
  misc_feature (61)..(61): /note="Nucleotide may be methylated to form 5-methylcytosine"
gcagctaccgaagtacacatgtcctgttgtcattcatccacagggcaattacagctgccacgggctagccaaggtgtgcagcgatcactttgactcatagaacctaaagccttagtcaggcg

SEQ ID NO: 26517 - DNA, 122 bp, Homo sapiens
  misc_feature (61)..(62): /note="This region represents a CpG dinucleotide"
  misc_feature (61)..(61): /note="Nucleotide may be methylated to form 5-methylcytosine"
ttgtttttaattagagcctcaaccaaactcaaatacaatttgcatgaccacagctgaattcgcctatcatgtataccacaggacatttgcttttcctggttacagcatgactcagactttat

SEQ ID NO: 26518 - DNA, 122 bp, Homo sapiens
  misc_feature (61)..(62): /note="This region represents a CpG dinucleotide"
  misc_feature (61)..(61): /note="Nucleotide may be methylated to form 5-methylcytosine"
attgggtctcaaattagaacaagggccaggatttgaggtgttcaaggaattcaaaatagacgtgattggatttgaatggttgacagctttcttgaatatgcagtatgacgccactgggattt

SEQ ID NO: 26519 - DNA, 122 bp, Homo sapiens
  misc_feature (61)..(62): /note="This region represents a CpG dinucleotide"
  misc_feature (61)..(61): /note="Nucleotide may be methylated to form 5-methylcytosine"
cggttcattcagaatgggggaagaaatgatgtcatttccgagttgtgtcaacccaacttgcgtggctggaggttgattaacccattgaatgaactagcaggcttacttcatcattcacagag

SEQ ID NO: 26520 - DNA, 122 bp, Homo sapiens
  misc_feature (61)..(62): /note="This region represents a CpG dinucleotide"
  misc_feature (61)..(61): /note="Nucleotide may be methylated to form 5-methylcytosine"
gcggggatggtgccgcctcctaggggacatttggaaatgtgtctacggaggtgttttcatcgccactatgtctggtgtttgtgggagtgggggagtgtggggcaaggggaggggtcttggca

SEQ ID NO: 26521 - DNA, 122 bp, Homo sapiens
  misc_feature (61)..(62): /note="This region represents a CpG dinucleotide"
  misc_feature (61)..(61): /note="Nucleotide may be methylated to form 5-methylcytosine"
agctctgtcgtctgcggagggcttaagtgttaacagcttagtggaccctctgtctttacacgtgaggcggctgccctctaccagcgagggcgaagggtcggtgtgacagcattttgtatcca

SEQ ID NO: 26522 - DNA, 122 bp, Homo sapiens
  misc_feature (61)..(62): /note="This region represents a CpG dinucleotide"
  misc_feature (61)..(61): /note="Nucleotide may be methylated to form 5-methylcytosine"
gaggcctgtggctcagaagacctccccagataatgagtccttgctgggtctcagggaggccggatccctcggactgcagtgtaataactccaaagggttcggtttgataggctactgctgaa

SEQ ID NO: 26523 - DNA, 122 bp, Homo sapiens
  misc_feature (61)..(62): /note="This region represents a CpG dinucleotide"
  misc_feature (61)..(61): /note="Nucleotide may be methylated to form 5-methylcytosine"
aaaacagcagtgctgaaaggtatccgtatccacagccacacaaaaaagagaagatcttcacgtcacccacctaaggacagcccaaaacactgctgctgttctggaggcagcccaaatatcct

SEQ ID NO: 26524 - DNA, 122 bp, Homo sapiens
  misc_feature (61)..(62): /note="This region represents a CpG dinucleotide"
  misc_feature (61)..(61): /note="Nucleotide may be methylated to form 5-methylcytosine"
taacatgaaccctatgactcagtaaatttagtcaccaggttacctgaaagggacacaacacgtcactcacctgggttctacccacatctgctgcctgaatcattcccttcctcaagtaccgc

SEQ ID NO: 26525 - DNA, 122 bp, Homo sapiens
  misc_feature (61)..(62): /note="This region represents a CpG dinucleotide"
  misc_feature (61)..(61): /note="Nucleotide may be methylated to form 5-methylcytosine"
ttgagtcacccttacacacctcactagatgcacccaccaacttgcagtggggtctcaacccgactctgcctcaactcaccgcctgctgcttgctctggaattcgtgctctcgctctctgcgg

SEQ ID NO: 26526 - DNA, 122 bp, Homo sapiens
  misc_feature (61)..(62): /note="This region represents a CpG dinucleotide"
  misc_feature (61)..(61): /note="Nucleotide may be methylated to form 5-methylcytosine"
aacactgctgtgctctcaggacacctagctgagctggcagcacaaaccagtgtgagggcacgcttcacatttagagctggtacttacttctgctagcagaatggagcagtgggagctgaggc

SEQ ID NO: 26527 - DNA, 122 bp, Homo sapiens
  misc_feature (61)..(62): /note="This region represents a CpG dinucleotide"
  misc_feature (61)..(61): /note="Nucleotide may be methylated to form 5-methylcytosine"
ttaaaatgcttagccatcagcgtatgcctctattttttaagggctttttataagcaaatacgggtagaaaaacattggcagtttgagagtaaaataaacatatataactcaccaactgactg

SEQ ID NO: 26528 - DNA, 122 bp, Homo sapiens
  misc_feature (61)..(62): /note="This region represents a CpG dinucleotide"
  misc_feature (61)..(61): /note="Nucleotide may be methylated to form 5-methylcytosine"
tgtttcagtactggtcgtggcctctagcaatacaagttttggtcatgggatggcataccacgaaaccttgtattacctgagcctggatcacaagtgacaagggatggattcaaacacatgtg

SEQ ID NO: 26529 - DNA, 122 bp, Homo sapiens
  misc_feature (61)..(62): /note="This region represents a CpG dinucleotide"
  misc_feature (61)..(61): /note="Nucleotide may be methylated to form 5-methylcytosine"
tggaaggaatgtcttgtcttcttcaatctttgtcactaacttctacatcttcagagtagccgttagagtcgccgtttgtccaaggtggcttgaaaatggctccactctgatttatgggaggt

SEQ ID NO: 26530 - DNA, 122 bp, Homo sapiens
  misc_feature (61)..(62): /note="This region represents a CpG dinucleotide"
  misc_feature (61)..(61): /note="Nucleotide may be methylated to form 5-methylcytosine"
gaacaatgggggagacacttttgcatttagacacagcctcagtgatcccagggagtgagtcggtgagagatgactcagatgtgaattccccgctgactcccattttcatccccttgggcagt

SEQ ID NO: 26531 - DNA, 122 bp, Homo sapiens
  misc_feature (61)..(62): /note="This region represents a CpG dinucleotide"
  misc_feature (61)..(61): /note="Nucleotide may be methylated to form 5-methylcytosine"
gtaatctcacaacacaagtcattttggcatccacagtcagatgtcacctggggtcacagtcgcctgtatgcggtggaaagttctaagcagttgcagttgcttttgtgatatgccagttgact

SEQ ID NO: 26532 - DNA, 122 bp, Homo sapiens
  misc_feature (61)..(62): /note="This region represents a CpG dinucleotide"
  misc_feature (61)..(61): /note="Nucleotide may be methylated to form 5-methylcytosine"
gcatgacaactgccctcctgtcccacagcttgggatgggatgaggtcacagggtggggtccgccccaagatgctggcctggcctggctcagatgagagccctttgggtgtttctcagtttcc

SEQ ID NO: 26533 - DNA, 122 bp, Homo sapiens
  misc_feature (61)..(62): /note="This region represents a CpG dinucleotide"
  misc_feature (61)..(61): /note="Nucleotide may be methylated to form 5-methylcytosine"
tttgaagtctggcagagacgtttgagtggcttctgtccacctcctcagtgactcacagtgcgatgctcatggttgaacctgagtgatgccagcagcaaggaaactgacagagctcgccgatc

SEQ ID NO: 26534 - DNA, 122 bp, Homo sapiens
  misc_feature (61)..(62): /note="This region represents a CpG dinucleotide"
  misc_feature (61)..(61): /note="Nucleotide may be methylated to form 5-methylcytosine"
gaaaccagccagttacaaaaggacaaatactgtgtgattccacttataggaggtacttagcgtagtcaaaatcatagacacagaaagaagaatggcagtttccaggggctgggggtgagagt

SEQ ID NO: 26535 - DNA, 122 bp, Homo sapiens
  misc_feature (61)..(62): /note="This region represents a CpG dinucleotide"
  misc_feature (61)..(61): /note="Nucleotide may be methylated to form 5-methylcytosine"
gattagggctcagctttaaaaagcaaagagggcttttggagtgggaaaagggatttcttgcggggagaggaatttagactgtttacttaagcttaattggcaaaagtaattatttatgatgt

SEQ ID NO: 26536 - DNA, 122 bp, Homo sapiens
  misc_feature (61)..(62): /note="This region represents a CpG dinucleotide"
  misc_feature (61)..(61): /note="Nucleotide may be methylated to form 5-methylcytosine"
ctctggctaagtcagcacacaatcagctttactggctcaagtatcaattactgaagctctcgcctgctgatgcataattcacggggctaacaaagcaaagaaatactgtaattaaacagcac

SEQ ID NO: 26537 - DNA, 122 bp, Homo sapiens
  misc_feature (61)..(62): /note="This region represents a CpG dinucleotide"
  misc_feature (61)..(61): /note="Nucleotide may be methylated to form 5-methylcytosine"
tttcttcacatcctccttccgatcaaggagatcaatcttggactcctagaagtcatagaacggaagaggacctcttgtggttgaaaatgagaatatgctcaactaatataagttaaattttg

SEQ ID NO: 26538 - DNA, 122 bp, Homo sapiens
  misc_feature (61)..(62): /note="This region represents a CpG dinucleotide"
  misc_feature (61)..(61): /note="Nucleotide may be methylated to form 5-methylcytosine"
agccgacgctacgaaggcctgagggacagcgaggcatcctgggaggcgccctggctcagacgctcctgtgggagggcgtctgcgtcctcagtttccccaggacgcgtaaggagaaaaccggg

SEQ ID NO: 26539 - DNA, 122 bp, Homo sapiens
  misc_feature (61)..(62): /note="This region represents a CpG dinucleotide"
  misc_feature (61)..(61): /note="Nucleotide may be methylated to form 5-methylcytosine"
ctcctgataaatcttacttcactttatgatccatcttattcacagctgttgagtcaggcacgactaaggttaaatcttagttctgcccttattggctatatgaccttggataaatagaaggt

SEQ ID NO: 26540 - DNA, 122 bp, Homo sapiens
  misc_feature (61)..(62): /note="This region represents a CpG dinucleotide"
  misc_feature (61)..(61): /note="Nucleotide may be methylated to form 5-methylcytosine"
gacaaagagacctgggtttaatccttgcagaccttagctatattgtctaacctcttgggacgtcagtttcctcatctttgaaatgggcatgccaacatccaacttctcatgaggacttatgg

SEQ ID NO: 26541 - DNA, 122 bp, Homo sapiens
  misc_feature (61)..(62): /note="This region represents a CpG dinucleotide"
  misc_feature (61)..(61): /note="Nucleotide may be methylated to form 5-methylcytosine"
caaaacaaaaaacagcctcaaccatgctgattgaattcacatacacaaatatcaaaggatcgttaaatactccctgggaggaaatttcctatgatgtttgctttcccactgtctaaaagaga

SEQ ID NO: 26542 - DNA, 122 bp, Homo sapiens
  misc_feature (61)..(62): /note="This region represents a CpG dinucleotide"
  misc_feature (61)..(61): /note="Nucleotide may be methylated to form 5-methylcytosine"
cactcataaaaagaccaactttagcaccattttcaatcaagaatattccttgaggccaggcggcgtggctcacacctgtaatcccagcactctgggaggcttggggcgggtggatcacctga

SEQ ID NO: 26543 - DNA, 122 bp, Homo sapiens
  misc_feature (61)..(62): /note="This region represents a CpG dinucleotide"
  misc_feature (61)..(61): /note="Nucleotide may be methylated to form 5-methylcytosine"
agtgtttcctctgccttaatgctcttttctccctgcattacctaattaatgcctcttatccgtaagattcccttcaactgtgaaaatctttcctaacttccttaatgaggtcacttttctta

SEQ ID NO: 26544 - DNA, 122 bp, Homo sapiens
  misc_feature (61)..(62): /note="This region represents a CpG dinucleotide"
  misc_feature (61)..(61): /note="Nucleotide may be methylated to form 5-methylcytosine"
ttaagctgtacaactagcaatattcttttccaggaatctagttggaaaaccttttaaagtcggctggcaatgaagggattaaaagctgaggaattaaataactgtctccacctcctagacac

SEQ ID NO: 26545 - DNA, 122 bp, Homo sapiens
  misc_feature (61)..(62): /note="This region represents a CpG dinucleotide"
  misc_feature (61)..(61): /note="Nucleotide may be methylated to form 5-methylcytosine"
agttttttatttgaagacactctgaccccacagtgccactgcaggagccagcctggtggacgcagagccctgaggtcacggtagacaagaaaacaggcaccagttattgtccaagaacacag

SEQ ID NO: 26546 - DNA, 122 bp, Homo sapiens
  misc_feature (61)..(62): /note="This region represents a CpG dinucleotide"
  misc_feature (61)..(61): /note="Nucleotide may be methylated to form 5-methylcytosine"
cccttaggggcctcaagcaggagggctgagggcaccgctggttcgtctgttcatggtgggcggctttgtgtggccaccagtgctgggtggtgtgggtttgggctgttctccctcctggctca

SEQ ID NO: 26547 - DNA, 122 bp, Homo sapiens
  misc_feature (61)..(62): /note="This region represents a CpG dinucleotide"
  misc_feature (61)..(61): /note="Nucleotide may be methylated to form 5-methylcytosine"
tccttcatgcttaaaagcactaatctttcagaaatgctgtagtggtgttctgtgcctggacgtaactgaccaagccagttaggtcagccaagcaggttaatcaatgtggtttgctatcagct

SEQ ID NO: 26548 - DNA, 122 bp, Homo sapiens
  misc_feature (61)..(62): /note="This region represents a CpG dinucleotide"
  misc_feature (61)..(61): /note="Nucleotide may be methylated to form 5-methylcytosine"
gactatgctctcagaatatgttctagaacacctaagttgcaattcttaaaatcaacacagcgtaagactgctttaggaggaagtgatcaagctcaaagcaacctaggcatgatgtgccttgt

SEQ ID NO: 26549 - DNA, 122 bp, Homo sapiens
  misc_feature (61)..(62): /note="This region represents a CpG dinucleotide"
  misc_feature (61)..(61): /note="Nucleotide may be methylated to form 5-methylcytosine"
gcaggtcatcagtgttttacatccaacaaactaatggtcatttgctgctttataaagagccgatataattttgtcttccttgttattaaaggatcaagcaagggtgtttctgtaccagttca

SEQ ID NO: 26550 - DNA, 122 bp, Homo sapiens
  misc_feature (61)..(62): /note="This region represents a CpG dinucleotide"
  misc_feature (61)..(61): /note="Nucleotide may be methylated to form 5-methylcytosine"
ggctgattcccattgcacaataatacagcgtcataaatcaagccaaggacagcagcctgtcgtctttacttaaaatgatgaaagtttgctcattatgggtattcttgcattcatcttaattt

SEQ ID NO: 26551 - DNA, 122 bp, Homo sapiens
  misc_feature (61)..(62): /note="This region represents a CpG dinucleotide"
  misc_feature (61)..(61): /note="Nucleotide may be methylated to form 5-methylcytosine"
ccgtggagccccaagctggcctgggtgccaagacagggcacagggcagtcctgcccccagcgaggcccccctactgggccaccagcccaatctaagccaaaggctggctactgggcaagggg

SEQ ID NO: 26552 - DNA, 122 bp, Homo sapiens
  misc_feature (61)..(62): /note="This region represents a CpG dinucleotide"
  misc_feature (61)..(61): /note="Nucleotide may be methylated to form 5-methylcytosine"
ctgtgataccatgacagtgaatctacacccaagatggctactaagtgactaatggcaatccgtgcaggacagaccagggtggagcaagatttcatcattggtactcagaatggtgtgcaatt

SEQ ID NO: 26553 - DNA, 122 bp, Homo sapiens
  misc_feature (61)..(62): /note="This region represents a CpG dinucleotide"
  misc_feature (61)..(61): /note="Nucleotide may be methylated to form 5-methylcytosine"
gacagtatttctaaaggcttgaagcaggacataaacacagcctccaaagtaaaacacaaccgtaacaacactctgctatcattcagcatgagttcctgtcaaaagcacttcctttagaaatg

SEQ ID NO: 26554 - DNA, 122 bp, Homo sapiens
  misc_feature (61)..(62): /note="This region represents a CpG dinucleotide"
  misc_feature (61)..(61): /note="Nucleotide may be methylated to form 5-methylcytosine"
ctggcttttccttttcagggagtagcgggctgggcagaccggcctcccttctcgcagcctcgcacaaggagcctgagcacgtaagacatctggaatgcatcaaaggcgaggcccagccagag

SEQ ID NO: 26555 - DNA, 122 bp, Homo sapiens
  misc_feature (61)..(62): /note="This region represents a CpG dinucleotide"
  misc_feature (61)..(61): /note="Nucleotide may be methylated to form 5-methylcytosine"
tcgaaacagttactgactaacaggcactctccgtggataggtagctgactgccctgctgtcgccgcctcagcagtcagactgggagggcaggcttatatggagagccctgaggcccagggta

SEQ ID NO: 26556 - DNA, 122 bp, Homo sapiens
  misc_feature (61)..(62): /note="This region represents a CpG dinucleotide"
  misc_feature (61)..(61): /note="Nucleotide may be methylated to form 5-methylcytosine"
ttaaatcgcaaggcttcctatgcccagagggggtgacttctcaattttgcacaaagtcatcgtgtaaattagcagggattctttaaatatggtcagattatagaaggccatgcaaatttctt

SEQ ID NO: 26557 - DNA, 122 bp, Homo sapiens
  misc_feature (61)..(62): /note="This region represents a CpG dinucleotide"
  misc_feature (61)..(61): /note="Nucleotide may be methylated to form 5-methylcytosine"
tcttgaaaacagcagtttcccttgatgttctttggccacactactgtttggtttaactagcgtttctggtattggagttgtttgagtctcagaatgactttgcttagaatttttatatttct

SEQ ID NO: 26558 - DNA, 122 bp, Homo sapiens
  misc_feature (61)..(62): /note="This region represents a CpG dinucleotide"
  misc_feature (61)..(61): /note="Nucleotide may be methylated to form 5-methylcytosine"
ggcagccgagatgctttatggattgatccacgcccgctacatccttaccaaccgtggcatcgcccagatggtgaggcctctctgctcctacctgcctccttctgagcagtaagagacacagg

SEQ ID NO: 26559 - DNA, 122 bp, Homo sapiens
  misc_feature (61)..(62): /note="This region represents a CpG dinucleotide"
  misc_feature (61)..(61): /note="Nucleotide may be methylated to form 5-methylcytosine"
cctctatagtagtttttttccagtagtaattgcatttcccccttttggaagaaagaaattcgagctttgtgggcttccaagaaaatttcagccaattaagtgaatgagagctgaagggacta

SEQ ID NO: 26560 - DNA, 122 bp, Homo sapiens
  misc_feature (61)..(62): /note="This region represents a CpG dinucleotide"
  misc_feature (61)..(61): /note="Nucleotide may be methylated to form 5-methylcytosine"
tggatgatgtaagctgtacgcaagactgtcagaggccaactactccaaaactttcttcctcgtaaataactggaagtcaggatgaactggctcggcaaagactccctcaccatatctgacct

SEQ ID NO: 26561 - DNA, 122 bp, Homo sapiens
  misc_feature (61)..(62): /note="This region represents a CpG dinucleotide"
  misc_feature (61)..(61): /note="Nucleotide may be methylated to form 5-methylcytosine"
ctctccatcccctaaccttctctgttccagacaaaaattagcttccttgtagttcttcaacgtgccaggcatccgctcacctcaagggctttgtacttcctcttcctccccaagatatccat

SEQ ID NO: 26562 - DNA, 122 bp, Homo sapiens
  misc_feature (61)..(62): /note="This region represents a CpG dinucleotide"
  misc_feature (61)..(61): /note="Nucleotide may be methylated to form 5-methylcytosine"
atgatcttatttttaccttcctgctcctaaactaaacgatataaaaagcttagttctggccgggcgccgtggttcacgcctgtaatcctagcactttggggtaacaccgtgaaaccccgtct

SEQ ID NO: 26563 - DNA, 122 bp, Homo sapiens
  misc_feature (61)..(62): /note="This region represents a CpG dinucleotide"
  misc_feature (61)..(61): /note="Nucleotide may be methylated to form 5-methylcytosine"
ctgaccaggctaaagcttccttcattgacgcatgcaatttttttttttttgagatggagtcgcactctgtcaccaagggtatagtgcaatggcgcaatcttggctcactgcaacctctgcct

SEQ ID NO: 26564 - DNA, 122 bp, Homo sapiens
  misc_feature (61)..(62): /note="This region represents a CpG dinucleotide"
  misc_feature (61)..(61): /note="Nucleotide may be methylated to form 5-methylcytosine"
gaatgaaaggtccttggtcttttggtttttgttgtgttcatttcacagcagatcagtgagcgtgtccttactgcctggccccagttcaagtcctggtgttagtgcttcggctttgaagtcag

SEQ ID NO: 26565 - DNA, 122 bp, Homo sapiens
  misc_feature (61)..(62): /note="This region represents a CpG dinucleotide"
  misc_feature (61)..(61): /note="Nucleotide may be methylated to form 5-methylcytosine"
gaaagcttgttctcatctggcctctttgctatttttagaaaggtaggtgatctttaaattcgtattgcaaggaaatttgtcaaaatgtattcttctaagtggcataagctccctcctaggcc

SEQ ID NO: 26566 - DNA, 122 bp, Homo sapiens
  misc_feature (61)..(62): /note="This region represents a CpG dinucleotide"
  misc_feature (61)..(61): /note="Nucleotide may be methylated to form 5-methylcytosine"
cttcagaggcatggcctattgaagagcaattaccatctccctgtgttggaactaaaggcacggaatgtcactcgggccatgtgtttgcgattcagagaatctttagtttcatatgattaggc

SEQ ID NO: 26567 - DNA, 122 bp, Homo sapiens
  misc_feature (61)..(62): /note="This region represents a CpG dinucleotide"
  misc_feature (61)..(61): /note="Nucleotide may be methylated to form 5-methylcytosine"
actgacattctcaccttctttagggtagggcatctaaggccctggcagatgaagatgctacgaaagaagaggaatcaactcatcattaaggcatcatgagtcaaaggcgtcagctacatgca

SEQ ID NO: 26568 - DNA, 122 bp, Homo sapiens
  misc_feature (61)..(62): /note="This region represents a CpG dinucleotide"
  misc_feature (61)..(61): /note="Nucleotide may be methylated to form 5-methylcytosine"
aaggaaagatgaattccaacactattttttccctgctccgtcctgggcctatccctcctccgttagccaggcaagtgtgaatcattctgacccagaccaggtgcacaaaaccctgggagggg

SEQ ID NO: 26569 - DNA, 122 bp, Homo sapiens
  misc_feature (61)..(62): /note="This region represents a CpG dinucleotide"
  misc_feature (61)..(61): /note="Nucleotide may be methylated to form 5-methylcytosine"
ccagagaaagcactcattcccttccttgggattcctttcctgcccatcagttatatacatcggggcagcttaagtgattattaaatactgaaaaacttctataccaattggtaaaaagcagt

SEQ ID NO: 26570 - DNA, 122 bp, Homo sapiens
  misc_feature (61)..(62): /note="This region represents a CpG dinucleotide"
  misc_feature (61)..(61): /note="Nucleotide may be methylated to form 5-methylcytosine"
gacagcgggtgagtcggggtgggctgtgcacagagagctgagcctgaacacaggccaggtcgtcctagcaggggcaggacatgggctgctgaaggaaaccagtcctccttcaggcccagcag

SEQ ID NO: 26571 - DNA, 122 bp, Homo sapiens
  misc_feature (61)..(62): /note="This region represents a CpG dinucleotide"
  misc_feature (61)..(61): /note="Nucleotide may be methylated to form 5-methylcytosine"
gaaggatctgaggcagaggacgtggatggtgccatgctggcgtctctgtgcatctggcagcgcaacaaaggacttctgtctgccctgcgaggctgggtcggtaaaacccacttcaattgaaa

SEQ ID NO: 26572 - DNA, 122 bp, Homo sapiens
  misc_feature (61)..(62): /note="This region represents a CpG dinucleotide"
  misc_feature (61)..(61): /note="Nucleotide may be methylated to form 5-methylcytosine"
cttgggaaagaatatttcctagtaattgctttttcccaaccataaattttatctgccagccgactgactcatagcctgaaaggaacttgtttattacagttttctgtaacaaaagaccaaat

SEQ ID NO: 26573 - DNA, 122 bp, Homo sapiens
  misc_feature (61)..(62): /note="This region represents a CpG dinucleotide"
  misc_feature (61)..(61): /note="Nucleotide may be methylated to form 5-methylcytosine"
tgtccaggccaggctgagtggggcctagtctgatcagcagtgctctcctcgttcaaggtccgtgagcgttttgtgtgtgactcagcctttgagcagatcaccctggagtcggagcggatccg

SEQ ID NO: 26574 - DNA, 122 bp, Homo sapiens
  misc_feature (61)..(62): /note="This region represents a CpG dinucleotide"
  misc_feature (61)..(61): /note="Nucleotide may be methylated to form 5-methylcytosine"
caatgcaatgtcaaaaaaaaaacaaaaaaacctcctaagttatagatggctcaacagtaacgtacatctgattgccttgagctttgcatgggattaagaaaagagggttagaattaagtgat

SEQ ID NO: 26575 - DNA, 122 bp, Homo sapiens
  misc_feature (61)..(62): /note="This region represents a CpG dinucleotide"
  misc_feature (61)..(61): /note="Nucleotide may be methylated to form 5-methylcytosine"
atgactcaggggaaggcatttcagggtaattctgattaatctaactcagtggttctcaatcgtagctgctcaataaaatcacctgggggaactgttaaagcagtcagggttaagaaactata

SEQ ID NO: 26576 - DNA, 122 bp, Homo sapiens
  misc_feature (61)..(62): /note="This region represents a CpG dinucleotide"
  misc_feature (61)..(61): /note="Nucleotide may be methylated to form 5-methylcytosine"
tcccctgcccactgcccctgggcatcagccctctgcaccagggcagtgccatctgagggacgggcttgcctcgcccagatcctgtttggccagggcttatctcgctctgcctccgttttctc

SEQ ID NO: 26577 - DNA, 122 bp, Homo sapiens
  misc_feature (61)..(62): /note="This region represents a CpG dinucleotide"
  misc_feature (61)..(61): /note="Nucleotide may be methylated to form 5-methylcytosine"
tctgcctaaccacttcagttgacagctcatttgtaagatctgccacactcttttattcagcgtctcctaaagatgccacctctcagatatcaccttaacacacttcttatctgggagggatt

SEQ ID NO: 26578 - DNA, 122 bp, Homo sapiens
  misc_feature (61)..(62): /note="This region represents a CpG dinucleotide"
  misc_feature (61)..(61): /note="Nucleotide may be methylated to form 5-methylcytosine"
cgcaggggcagatgggactcggccactttcggcacgctgggctgaaagtgggcgcgtctgcgactgggagggggtcggagagaagccacaaagcccgggctgcagaggcggttctgcagggt

SEQ ID NO: 26579 - DNA, 122 bp, Homo sapiens
  misc_feature (61)..(62): /note="This region represents a CpG dinucleotide"
  misc_feature (61)..(61): /note="Nucleotide may be methylated to form 5-methylcytosine"
gatgacattgccagcatgccagagaacagatagcatcagggctacaccccagtgcagaggcgtggaattcagtgaacagtaatgtcaactggaggagagagatgtcatttgaacagggcttt

SEQ ID NO: 26580 - DNA, 122 bp, Homo sapiens
  misc_feature (61)..(62): /note="This region represents a CpG dinucleotide"
  misc_feature (61)..(61): /note="Nucleotide may be methylated to form 5-methylcytosine"
tgttggaagcttctgagctctgtctgtccaaagaacattctgctgatgagtcacaacagacgattagttaggactgcttggttttttaggaaacaggcattgtacaaagtgtaaggatctct

SEQ ID NO: 26581 - DNA, 122 bp, Homo sapiens
  misc_feature (61)..(62): /note="This region represents a CpG dinucleotide"
  misc_feature (61)..(61): /note="Nucleotide may be methylated to form 5-methylcytosine"
tttaggcaggggtctagacactggaaacccagcagtgaatagaccagtgaaatccttgaccgcagggagtagtcaagggaaggaatgtgtaattttaggttgttgtaagttgtgaagcaaag

SEQ ID NO: 26582 - DNA, 122 bp, Homo sapiens
  misc_feature (61)..(62): /note="This region represents a CpG dinucleotide"
  misc_feature (61)..(61): /note="Nucleotide may be methylated to form 5-methylcytosine"
gcaaacaaatgatattgcttcctcatggcagaggactaagtaatcggcacatttatcaaccgctgcttggccttgtggctgttcagatattgtatgtgccacgacatcgtttcctttgtggc

SEQ ID NO: 26583 - DNA, 122 bp, Homo sapiens
  misc_feature (61)..(62): /note="This region represents a CpG dinucleotide"
  misc_feature (61)..(61): /note="Nucleotide may be methylated to form 5-methylcytosine"
aacctgaggcccgagggatagaggtgcttgtatgaatttgaacaaattgatttgtatgtgcgtatctgttataagctgggccctctgtggcatgagttccaaggaagcccccactccatacc

SEQ ID NO: 26584 - DNA, 122 bp, Homo sapiens
  misc_feature (61)..(62): /note="This region represents a CpG dinucleotide"
  misc_feature (61)..(61): /note="Nucleotide may be methylated to form 5-methylcytosine"
ggagaagacaaggcaggaatcagctctcagaattccacaccaaggccttctgggctcccccggtcttcccacggacgagacacaagtgacccttggaaacttctagagaaatgaaaggtgaa

SEQ ID NO: 26585 - DNA, 122 bp, Homo sapiens
  misc_feature (61)..(62): /note="This region represents a CpG dinucleotide"
  misc_feature (61)..(61): /note="Nucleotide may be methylated to form 5-methylcytosine"
ccattagcaaggggaagatagtagatacactctggaagcattacctaagggagaaaaagacggactagatgccaccaactgcaagtttccacacctcgtggacaaggcacacgaccacaaag

SEQ ID NO: 26586 - DNA, 122 bp, Homo sapiens
  misc_feature (61)..(62): /note="This region represents a CpG dinucleotide"
  misc_feature (61)..(61): /note="Nucleotide may be methylated to form 5-methylcytosine"
agtctgggcacagttccaggtcattaaggttaccacatagcaggatgacttggaagatctcgaagctaaagcctccagaaggctttagtcagagaaaggcaaggcctccctgcccgctcatc

SEQ ID NO: 26587 - DNA, 122 bp, Homo sapiens
  misc_feature (61)..(62): /note="This region represents a CpG dinucleotide"
  misc_feature (61)..(61): /note="Nucleotide may be methylated to form 5-methylcytosine"
cctagaaggtaaactcacatcactggcctaatccaatttttccctcatggaggagtcagccgtagataaatttgctgcctactagcttcactctgtgccattctgactcacctggatggcat

SEQ ID NO: 26588 - DNA, 122 bp, Homo sapiens
  misc_feature (61)..(62): /note="This region represents a CpG dinucleotide"
  misc_feature (61)..(61): /note="Nucleotide may be methylated to form 5-methylcytosine"
gaaccagagccaggtataaagaacaaggcgatggaggtgtgcggctgcgtagacgtctgccggccgaagatgggtgtgcgaccccggaggggatcactttctttgtgtaaggcctttagtgc

SEQ ID NO: 26589 - DNA, 122 bp, Homo sapiens
  misc_feature (61)..(62): /note="This region represents a CpG dinucleotide"
  misc_feature (61)..(61): /note="Nucleotide may be methylated to form 5-methylcytosine"
tccaaatccgtgtcctttgtgccaacaggtgtgccaggctgctcacaagacaccatggtacgagaaaggatttctcgtagtcacctagacaccaggtttatggctgtgtcgcagcaaagttg

SEQ ID NO: 26590 - DNA, 122 bp, Homo sapiens
  misc_feature (61)..(62): /note="This region represents a CpG dinucleotide"
  misc_feature (61)..(61): /note="Nucleotide may be methylated to form 5-methylcytosine"
aatcttcagctctcaagctacagcaaggacttcggaaacgagcagagctgcagctgagatcgaggcagggacttagccctcttgtttcctggactgaccctgctccaactgttcctaaaact

SEQ ID NO: 26591 - DNA, 122 bp, Homo sapiens
  misc_feature (61)..(62): /note="This region represents a CpG dinucleotide"
  misc_feature (61)..(61): /note="Nucleotide may be methylated to form 5-methylcytosine"
tttagaagctccctggcctctacctaaggggtgctggtagtacctccctcccagctgtgacgatcaaaagtgtccccagacatagccaaatgccccctgggggctaaaatcatcccctgttc

SEQ ID NO: 26592 - DNA, 122 bp, Homo sapiens
  misc_feature (61)..(62): /note="This region represents a CpG dinucleotide"
  misc_feature (61)..(61): /note="Nucleotide may be methylated to form 5-methylcytosine"
cacttttacctgacttaccagttgttcacattttgcaactcagaagtatagtctcccatgcgtcccagaaggaaagagaaacagacacaggtgagcatcaccatcctgacctcactcatctc

SEQ ID NO: 26593 - DNA, 122 bp, Homo sapiens
  misc_feature (61)..(62): /note="This region represents a CpG dinucleotide"
  misc_feature (61)..(61): /note="Nucleotide may be methylated to form 5-methylcytosine"
ctttccagaaacctggctttctgctctcatggccccctgagccggtggggcacattttgacgtcaggcagaccagagggtcagatcccagacccacagctcacttgctgggtgagtatgagc

SEQ ID NO: 26594 - DNA, 122 bp, Homo sapiens
  misc_feature (61)..(62): /note="This region represents a CpG dinucleotide"
  misc_feature (61)..(61): /note="Nucleotide may be methylated to form 5-methylcytosine"
ctcctgttcacagatgaggaacttcagcttggtgtggttaagaaacttctccacagatcacgcacagctagtagcaaagccaagaatgggacccagccagtcagactcctaagcctattgtt

SEQ ID NO: 26595 - DNA, 122 bp, Homo sapiens
  misc_feature (61)..(62): /note="This region represents a CpG dinucleotide"
  misc_feature (61)..(61): /note="Nucleotide may be methylated to form 5-methylcytosine"
ccctttttgagcctcaaatcacaggactgggtgtgccgaaggtgatggcctggtgcctggcgctacatcacccatcacccatcacccaggcaccgcctggtgcagagctgggccagggaggc

SEQ ID NO: 26596 - DNA, 122 bp, Homo sapiens
  misc_feature (61)..(62): /note="This region represents a CpG dinucleotide"
  misc_feature (61)..(61): /note="Nucleotide may be methylated to form 5-methylcytosine"
ccctgaacctttcccagctgggcttacttggccctgcctgcaattcctcctgcccaccgacggccactcccacctgcattccagttccctgcaggctccaggacgaggggcccaccttgctc

SEQ ID NO: 26597 - DNA, 122 bp, Homo sapiens
  misc_feature (61)..(62): /note="This region represents a CpG dinucleotide"
  misc_feature (61)..(61): /note="Nucleotide may be methylated to form 5-methylcytosine"
ccttaaccaggagggcagctccctgaaggtgggacagggtgcccgccaccctgtctgatacgtgctttgcagataaggtggctcaccccatctgaccagctgccaccagctcctttgtaagg

SEQ ID NO: 26598 - DNA, 122 bp, Homo sapiens
  misc_feature (61)..(62): /note="This region represents a CpG dinucleotide"
  misc_feature (61)..(61): /note="Nucleotide may be methylated to form 5-methylcytosine"
ggactattacgtgggagtagccagcgatgtggagcagcagggggctgatgcctttgatcccgaggagtaccagttcacttgcttgacctacaaggaatctgagggtgccctcaatgagcaca

SEQ ID NO: 26599 - DNA, 122 bp, Homo sapiens
  misc_feature (61)..(62): /note="This region represents a CpG dinucleotide"
  misc_feature (61)..(61): /note="Nucleotide may be methylated to form 5-methylcytosine"
agatgaacacaagcttaggggaatcctaaagaagttgatcatgccctacttgttcaatgccgttttaccagcccaaggcagatccaagttgggggagataaaaagctttaaatagtataagt

SEQ ID NO: 26600 - DNA, 122 bp, Homo sapiens
  misc_feature (61)..(62): /note="This region represents a CpG dinucleotide"
  misc_feature (61)..(61): /note="Nucleotide may be methylated to form 5-methylcytosine"
tttatgtctgagaaaagaccaacaaaagcagctgtaaattattcaatcagaagaccctaacgtaacaaactgaagaggtataaggtttaccaagtatttatttggtgaagtttctactatag

SEQ ID NO: 26601 - DNA, 122 bp, Homo sapiens
  misc_feature (61)..(62): /note="This region represents a CpG dinucleotide"
  misc_feature (61)..(61): /note="Nucleotide may be methylated to form 5-methylcytosine"
agaaaatgaatgacaggattgttagagaccaggcatttcctttacagggtgctgtggctgcgacaggcatgtggtgttatctaaacactgaactcaaaaacaatgagaggctttcaatccaa

SEQ ID NO: 26602 - DNA, 122 bp, Homo sapiens
  misc_feature (61)..(62): /note="This region represents a CpG dinucleotide"
  misc_feature (61)..(61): /note="Nucleotide may be methylated to form 5-methylcytosine"
ttccagatgaagacaccgactcagagaggtttagtaattggctcaattggtcatgtagctcgtagatgccagagccaggttttaacccggtgaactaaggtcaaagctctttctatcatgga

SEQ ID NO: 26603 - DNA, 122 bp, Homo sapiens
  misc_feature (61)..(62): /note="This region represents a CpG dinucleotide"
  misc_feature (61)..(61): /note="Nucleotide may be methylated to form 5-methylcytosine"
gccagtgtagtgaaaccataaaagatgcagacatttccaaacacaagctgacactgggaccgagaaccacctctttcctacagcacccaaccactctcccaagtctgggcatcagacattgc

SEQ ID NO: 26604 - DNA, 122 bp, Homo sapiens
  misc_feature (61)..(62): /note="This region represents a CpG dinucleotide"
  misc_feature (61)..(61): /note="Nucleotide may be methylated to form 5-methylcytosine"
gcagcatctgcatcacccggagcttgtcagacacgcagatgctcgggccccgcccaggcccgccaaatcaaaagctgcatgttaagagggtcctcaggtgatgcatatgaagtttgaggagc

SEQ ID NO: 26605 - DNA, 122 bp, Homo sapiens
  misc_feature (61)..(62): /note="This region represents a CpG dinucleotide"
  misc_feature (61)..(61): /note="Nucleotide may be methylated to form 5-methylcytosine"
aggatggatgtatcttggaccaagatgacatccgtgttgcccatgacctgctgcttattacgtcagcttcctgggcactgcaagctggtgaagccttaccagctaagcctaagacactgcta

SEQ ID NO: 26606 - DNA, 122 bp, Homo sapiens
  misc_feature (61)..(62): /note="This region represents a CpG dinucleotide"
  misc_feature (61)..(61): /note="Nucleotide may be methylated to form 5-methylcytosine"
gatcaggcagaggatttgaaaaatgactgccaaaattctttctgagctttgctgagtgaacgtggaaggatttagagaagaaatccttaaagatttagtagcattttcacctgggactgttc

SEQ ID NO: 26607 - DNA, 122 bp, Homo sapiens
  misc_feature (61)..(62): /note="This region represents a CpG dinucleotide"
  misc_feature (61)..(61): /note="Nucleotide may be methylated to form 5-methylcytosine"
aggtatcatatgagagaataaatgattgtgtcctattcccaaaatgattccctctatatacgtactcccaaaggtgggaaagtataggtaaccaatgactctcacgtgtacttcttcttcag

SEQ ID NO: 26608 - DNA, 122 bp, Homo sapiens
  misc_feature (61)..(62): /note="This region represents a CpG dinucleotide"
  misc_feature (61)..(61): /note="Nucleotide may be methylated to form 5-methylcytosine"
gtcatcagaggcctggttggaatacagagtgttaattcttccatatctaagcctctttgtcgaaattccctttgtctcctgccccaagtcattaaacactaatcccatcactcttcctaatc

SEQ ID NO: 26609 - DNA, 122 bp, Homo sapiens
  misc_feature (61)..(62): /note="This region represents a CpG dinucleotide"
  misc_feature (61)..(61): /note="Nucleotide may be methylated to form 5-methylcytosine"
tagaaatcttgctcaccagatcacttttttatttgtgcttcctgctcatgagattgctagcggttactgccctcccacttccaaactaagagatagggatctgctcctaacggtcaactcgg

SEQ ID NO: 26610 - DNA, 122 bp, Homo sapiens
  misc_feature (61)..(62): /note="This region represents a CpG dinucleotide"
  misc_feature (61)..(61): /note="Nucleotide may be methylated to form 5-methylcytosine"
tgtcagaaactctgtgtgtggagctttgtccttccatgacttactcattctgactccttccgcctctccctgcccccagtcttaaaaatgaaatgatagggggttttgtttgcttttaaaac

SEQ ID NO: 26611 - DNA, 122 bp, Homo sapiens
  misc_feature (61)..(62): /note="This region represents a CpG dinucleotide"
  misc_feature (61)..(61): /note="Nucleotide may be methylated to form 5-methylcytosine"
caggatggacagtagatgcacttggcttgggaactcaaacaccagaattctgtgactgagcgataacctggaggaggaatagctaagaaataagtaaaaggtgagtcaccctgttgtacaac

SEQ ID NO: 26612 - DNA, 122 bp, Homo sapiens
  misc_feature (61)..(62): /note="This region represents a CpG dinucleotide"
  misc_feature (61)..(61): /note="Nucleotide may be methylated to form 5-methylcytosine"
acataatcttctcaggttcttattagaagaaatttccatcctctcccgttctagattaggcgcagtggagtccgctccatcaatgaagggactaaggtttcgtggacaataatgtggcaatt

SEQ ID NO: 26613 - DNA, 122 bp, Homo sapiens
  misc_feature (61)..(62): /note="This region represents a CpG dinucleotide"
  misc_feature (61)..(61): /note="Nucleotide may be methylated to form 5-methylcytosine"
aggaagcaaccaccatcctaggctagaggagcagaaggggtatagtgtcacctatagccacggtccctgcccacctggagctgctggagtcccactgctgctactcctatttggaaccactg

SEQ ID NO: 26614 - DNA, 122 bp, Homo sapiens
  misc_feature (61)..(62): /note="This region represents a CpG dinucleotide"
  misc_feature (61)..(61): /note="Nucleotide may be methylated to form 5-methylcytosine"
ctcctgcagacttgtctggcaccctgtgcatttgggatttggcacactatgtctcgtctgcggcctccactggacaatgagaccgtaagtgtgtggcttgacagaaagttgttgactctgct

SEQ ID NO: 26615 - DNA, 122 bp, Homo sapiens
  misc_feature (61)..(62): /note="This region represents a CpG dinucleotide"
  misc_feature (61)..(61): /note="Nucleotide may be methylated to form 5-methylcytosine"
tcacaaaggcccacatattgtacaacgccactcatataacatgttcaaaacaggcaaaaccggcctggcacagtggctcacccctgtaatcccagcactttaggaggccaaggcgggcagat

SEQ ID NO: 26616 - DNA, 122 bp, Homo sapiens
  misc_feature (61)..(62): /note="This region represents a CpG dinucleotide"
  misc_feature (61)..(61): /note="Nucleotide may be methylated to form 5-methylcytosine"
agtaggtacagaaataatgggtgacactgcaataacagacatggcacataggggtgcccacgcctccaggcagctttccaggaaacagcttcactgggaactggcaggccttaggagccatg

SEQ ID NO: 26617 - DNA, 122 bp, Homo sapiens
  misc_feature (61)..(62): /note="This region represents a CpG dinucleotide"
  misc_feature (61)..(61): /note="Nucleotide may be methylated to form 5-methylcytosine"
agaagtgaggttttgtggcaatccctgtcatctcctcctgagtcaaccaactcagtacagcggccagctgttaccagaagctgcgatttcctgcagttcctaaccagggtgttagtggcaac

SEQ ID NO: 26618 - DNA, 122 bp, Homo sapiens
  misc_feature (61)..(62): /note="This region represents a CpG dinucleotide"
  misc_feature (61)..(61): /note="Nucleotide may be methylated to form 5-methylcytosine"
cccctcctcccaccttgggactgcccccacactgttacctgtccctggtccaggaggattcgggcagctaactcagcctcctggagagacacacacggattcacacagaaacacatgaccat

SEQ ID NO: 26619 - DNA, 122 bp, Homo sapiens
  misc_feature (61)..(62): /note="This region represents a CpG dinucleotide"
  misc_feature (61)..(61): /note="Nucleotide may be methylated to form 5-methylcytosine"
ataatcacaaggataataatgaggcaatccttccatttctctcaaactggtcaggcctttcgtggatactcagtccaatctggcaacacaatgtttgagctgcatggagaacttggagaggg

SEQ ID NO: 26620 - DNA, 122 bp, Homo sapiens
  misc_feature (61)..(62): /note="This region represents a CpG dinucleotide"
  misc_feature (61)..(61): /note="Nucleotide may be methylated to form 5-methylcytosine"
caagatcctggtggtttccactgggccagcgcaggcaagggtggtgcgggaagaaggccacgttaggtacataggccatgtccaaattcaggttccatccagcaagctcctatttcttggac

SEQ ID NO: 26621 - DNA, 122 bp, Homo sapiens
  misc_feature (61)..(62): /note="This region represents a CpG dinucleotide"
  misc_feature (61)..(61): /note="Nucleotide may be methylated to form 5-methylcytosine"
ttggaaaattattaattgctctttactgtcagccatttatgccttccagtcaagaacgaacgtgaaggaaatgtcataaaccttaaatgtcagcaaggattcacttgaggcctactaataaa

SEQ ID NO: 26622 - DNA, 122 bp, Homo sapiens
  misc_feature (61)..(62): /note="This region represents a CpG dinucleotide"
  misc_feature (61)..(61): /note="Nucleotide may be methylated to form 5-methylcytosine"
tattccatataaaagcttcatggtgcagaattactatccccattttatagatagaagaaacggaggctcaggttcaaagtcacccagtgaataaactcagacaaatagcctcacgatctcat

SEQ ID NO: 26623 - DNA, 122 bp, Homo sapiens
  misc_feature (61)..(62): /note="This region represents a CpG dinucleotide"
  misc_feature (61)..(61): /note="Nucleotide may be methylated to form 5-methylcytosine"
gaagcacaacttcttttaccattaggcaaataatggtactgtaccaaacatctagaactgcgggaccatgtgtcttgattagtaattttatattgggggggcatattaggcatggctgagac

SEQ ID NO: 26624 - DNA, 122 bp, Homo sapiens
  misc_feature (61)..(62): /note="This region represents a CpG dinucleotide"
  misc_feature (61)..(61): /note="Nucleotide may be methylated to form 5-methylcytosine"
aggaggagggggcgggccttcgagacaccttcggagctcctgattggagctttctgaaggcgagggggtggggggggtggcgggaggagcgggaaggagcctcgggggagggaaggtagtga

SEQ ID NO: 26625 - DNA, 122 bp, Homo sapiens
  misc_feature (61)..(62): /note="This region represents a CpG dinucleotide"
  misc_feature (61)..(61): /note="Nucleotide may be methylated to form 5-methylcytosine"
cagtttagacaggaggtaggaatcttgctaatgaaaggagagcctcaccttcaattaaggcgtcaccagagtgggaaattcatcagccctggtgatggtgacttacgccacacttgagcctt

SEQ ID NO: 26626 - DNA, 122 bp, Homo sapiens
  misc_feature (61)..(62): /note="This region represents a CpG dinucleotide"
  misc_feature (61)..(61): /note="Nucleotide may be methylated to form 5-methylcytosine"
atgaagttgtttcattcaaatcagtcagccaggatttgctgagctttaagctcctgtctgcgaggaacttaccatctgtttggggagacaagatttatgcccaaggaaccacttgaaggagc

SEQ ID NO: 26627 - DNA, 122 bp, Homo sapiens
  misc_feature (61)..(62): /note="This region represents a CpG dinucleotide"
  misc_feature (61)..(61): /note="Nucleotide may be methylated to form 5-methylcytosine"
cgcacctgaatctggggagtatctagaggaggagcatgaaagttagaagtacctggcagacgaacagctagggcaggagcatatctgccagtggagcacctgaaccaggggagtccttgggg

SEQ ID NO: 26628 - DNA, 122 bp, Homo sapiens
  misc_feature (61)..(62): /note="This region represents a CpG dinucleotide"
  misc_feature (61)..(61): /note="Nucleotide may be methylated to form 5-methylcytosine"
ggccccatgagatcagagagggtggggagtatctggaggattttgcatccatagtgaggacgaagctgagataagcagagtttaataaacagccgctgtctttactaccactactcatttct

SEQ ID NO: 26629 - DNA, 122 bp, Homo sapiens
  misc_feature (61)..(62): /note="This region represents a CpG dinucleotide"
  misc_feature (61)..(61): /note="Nucleotide may be methylated to form 5-methylcytosine"
ggactctggtgggtggggaggcttcctggtcactaaccgctcaacatcaacctggacctgcggcagtgtctgtgctgactggcgtccccagcttagctagaggcccctgcttccctgtttcc

SEQ ID NO: 26630 - DNA, 122 bp, Homo sapiens
  misc_feature (61)..(62): /note="This region represents a CpG dinucleotide"
  misc_feature (61)..(61): /note="Nucleotide may be methylated to form 5-methylcytosine"
gtctgtcttatgagtgcacacaagcattttttgcagggaggtacagatccttccactaggcgtttctaactgtaacttagtcatacacattgagccaagcctatctgatacctcctcatcct

SEQ ID NO: 26631 - DNA, 122 bp, Homo sapiens
  misc_feature (61)..(62): /note="This region represents a CpG dinucleotide"
  misc_feature (61)..(61): /note="Nucleotide may be methylated to form 5-methylcytosine"
caacaaaaaccataaacagtgtgtctgactcatcagtcctcatgccttccaggcccatctcgcctgctaaccatttgtgtgacttttcagaatcactttccttttcttggcctacttttcct

SEQ ID NO: 26632 - DNA, 122 bp, Homo sapiens
  misc_feature (61)..(62): /note="This region represents a CpG dinucleotide"
  misc_feature (61)..(61): /note="Nucleotide may be methylated to form 5-methylcytosine"
cttgtaactagttcatccgtgtgcttgcatcgcactgctcataagttttcaaatatgggacggagtgctcaactctcgaagacatcattttcattacccgtttcccaaataaaatattaagg

SEQ ID NO: 26633 - DNA, 122 bp, Homo sapiens
  misc_feature (61)..(62): /note="This region represents a CpG dinucleotide"
  misc_feature (61)..(61): /note="Nucleotide may be methylated to form 5-methylcytosine"
tccccggaagcagtcagggcctgcgggggtttatgtcacaccctggctgcacgtggggatcgtgtctaagctttttggaaatgtcgatgccggactccgccccagacctggagctaggaact

SEQ ID NO: 26634 - DNA, 122 bp, Homo sapiens
  misc_feature (61)..(62): /note="This region represents a CpG dinucleotide"
  misc_feature (61)..(61): /note="Nucleotide may be methylated to form 5-methylcytosine"
gatcatgcaaaggaagtagagtaataaaggacctatgagattcattgacattgtggttgtcgaaggaggcaccttctagccagaaaatggaagatttctttccagtgattcatatgtattac

SEQ ID NO: 26635 - DNA, 122 bp, Homo sapiens
  misc_feature (61)..(62): /note="This region represents a CpG dinucleotide"
  misc_feature (61)..(61): /note="Nucleotide may be methylated to form 5-methylcytosine"
agatgggacattcacgatttacaacctgaaacacctctgacagaatagcaggcatcttgacgtaaggtcaaatagagagaacacccacatggactatgtcctaagtcaatcagataaaggat

SEQ ID NO: 26636 - DNA, 122 bp, Homo sapiens
  misc_feature (61)..(62): /note="This region represents a CpG dinucleotide"
  misc_feature (61)..(61): /note="Nucleotide may be methylated to form 5-methylcytosine"
cttactcacccttcaggtcatctacaatcctaacttttcatggctctgagacaaagactccgtcttttggtgaactaaggaaatgtcctgcaacatttttggcacacagcataggacttgag

SEQ ID NO: 26637 - DNA, 122 bp, Homo sapiens
  misc_feature (61)..(62): /note="This region represents a CpG dinucleotide"
  misc_feature (61)..(61): /note="Nucleotide may be methylated to form 5-methylcytosine"
ctcaagtgatctgcctgcctcggcctcccaaagcactgggattacaggtgtgagccactgcgcccggcctacctgtttgaattcttgcattcatgcatgtggagcattggcaagcctctgcc

SEQ ID NO: 26638 - DNA, 122 bp, Homo sapiens
  misc_feature (61)..(62): /note="This region represents a CpG dinucleotide"
  misc_feature (61)..(61): /note="Nucleotide may be methylated to form 5-methylcytosine"
cagcctatcccaatcacatgcaaatgcaaacagacatctcccctctggagtggattctagcggatcctctagttgcctgaattacaaagttggtcccttggttaaagcattccttcactggc

SEQ ID NO: 26639 - DNA, 122 bp, Homo sapiens
  misc_feature (61)..(62): /note="This region represents a CpG dinucleotide"
  misc_feature (61)..(61): /note="Nucleotide may be methylated to form 5-methylcytosine"
ggggtttcctggggtgttctgtctacatcctgagagcagtgggagctgctgcagacttttcgtgttggaaaggtcatctggcttttgtctccatggtcatccatggagaatggatgggaggt

SEQ ID NO: 26640 - DNA, 122 bp, Homo sapiens
  misc_feature (61)..(62): /note="This region represents a CpG dinucleotide"
  misc_feature (61)..(61): /note="Nucleotide may be methylated to form 5-methylcytosine"
ttttctctatgacactatcatttcctttagggcaggcactttgtctttcatttctgtgaccgttacctgtctggcccatagtaaccaatcaaggaatgggtctttgatttagtgtatgaata

SEQ ID NO: 26641 - DNA, 122 bp, Homo sapiens
  misc_feature (61)..(62): /note="This region represents a CpG dinucleotide"
  misc_feature (61)..(61): /note="Nucleotide may be methylated to form 5-methylcytosine"
tttagtcctgtttatgtgatgaatcacttttattgatttgtgtatgttgaatcaatcttgcgtcctggagatgatgcttacttgatcatggtggatttgctttttggtgagctgctggattc

SEQ ID NO: 26642 - DNA, 122 bp, Homo sapiens
  misc_feature (61)..(62): /note="This region represents a CpG dinucleotide"
  misc_feature (61)..(61): /note="Nucleotide may be methylated to form 5-methylcytosine"
accacactggcatcctgatctggaacttccagtgtctagaactgtttgaaataggccacgcgcagcggctcatggctgtaatcccagccctttgggaggccaaggccggtgaatcatctgaa

SEQ ID NO: 26643 - DNA, 122 bp, Homo sapiens
  misc_feature (61)..(62): /note="This region represents a CpG dinucleotide"
  misc_feature (61)..(61): /note="Nucleotide may be methylated to form 5-methylcytosine"
agaacttaccgacagcaaatgacagctttgcatgacaaagctaagtccaggaaatactgtcgtactccaaaggttaaggcatatttgagggttttcccatcaattataagagcaaaatcatt

SEQ ID NO: 26644 - DNA, 122 bp, Homo sapiens
  misc_feature (61)..(62): /note="This region represents a CpG dinucleotide"
  misc_feature (61)..(61): /note="Nucleotide may be methylated to form 5-methylcytosine"
aggtgatgccaatttaatgaactcaaagtacgttgcacatataaacaacagcagaacaaacgtttcatgcttgactgggattgtaactgaaagagttttgtttgaacagtgcagcttggtat

SEQ ID NO: 26645 - DNA, 122 bp, Homo sapiens
  misc_feature (61)..(62): /note="This region represents a CpG dinucleotide"
  misc_feature (61)..(61): /note="Nucleotide may be methylated to form 5-methylcytosine"
tcttggaccccaggaaatggcgtgccacgtgctcaggcaacatgttggtgaccaaggcctcgttccagcgtcgcatctcatagacacgttccttctggtcgtggacctcaatcttccacaag

SEQ ID NO: 26646 - DNA, 122 bp, Homo sapiens
  misc_feature (61)..(62): /note="This region represents a CpG dinucleotide"
  misc_feature (61)..(61): /note="Nucleotide may be methylated to form 5-methylcytosine"
tgattagtcatttcacaatgaggggatggcttcctggggtgttttcaagcttttgggtggcggcacagtctgcaagagggggaaaggctctgagaacaagatatgactaaagaatagtttct

SEQ ID NO: 26647 - DNA, 122 bp, Homo sapiens
  misc_feature (61)..(62): /note="This region represents a CpG dinucleotide"
  misc_feature (61)..(61): /note="Nucleotide may be methylated to form 5-methylcytosine"
ggaaaccatttaaacagccatattctgtcatattagtagtaaagtttcccatgccaaaggcgatggccacacacagcatgtcatgactcaagagttgagcaccaggtttgggcgaggtggcc

SEQ ID NO: 26648 - DNA, 122 bp, Homo sapiens
  misc_feature (61)..(62): /note="This region represents a CpG dinucleotide"
  misc_feature (61)..(61): /note="Nucleotide may be methylated to form 5-methylcytosine"
cctttaacttaaaccaaaacaaagacggtaacctttaatactagttagtctatttataaccgttccatctacaaacatttttctaatacaaacatgccctgatagcttatcttggtgcacat

SEQ ID NO: 26649 - DNA, 122 bp, Homo sapiens
  misc_feature (61)..(62): /note="This region represents a CpG dinucleotide"
  misc_feature (61)..(61): /note="Nucleotide may be methylated to form 5-methylcytosine"
tctcttttcttctttttctaaaatgaatctgggagtttcctttagcccctgttttgtggtcgcctcccatacacgttttatctgtccgtggcattttcttttatttattgaaagcaccgtgt

SEQ ID NO: 26650 - DNA, 122 bp, Homo sapiens
  misc_feature (61)..(62): /note="This region represents a CpG dinucleotide"
  misc_feature (61)..(61): /note="Nucleotide may be methylated to form 5-methylcytosine"
cggcccggggcccagcccagccggaagggggccaggcccgcaagcttctccagggtggcgcggcggcgacaagatgttccattggggagggaccccagctccccggcctcttcttcctccag

SEQ ID NO: 26651 - DNA, 122 bp, Homo sapiens
  misc_feature (61)..(62): /note="This region represents a CpG dinucleotide"
  misc_feature (61)..(61): /note="Nucleotide may be methylated to form 5-methylcytosine"
gtaaataacagagactgttctacagcaccaggaggaattctgactgccaatgggtgaagacgaggcacccagggaaataaaggggcagggatggggcagccctccacgcagaggagacgcct

SEQ ID NO: 26652 - DNA, 122 bp, Homo sapiens
  misc_feature (61)..(62): /note="This region represents a CpG dinucleotide"
  misc_feature (61)..(61): /note="Nucleotide may be methylated to form 5-methylcytosine"
atctttttagatcaggtactactccctaggaagcaggactattactctgacacctcatctcgctcctctgccctgccaaaccaggctcaaactcctgctgtcctggctctcactgcccaaac

SEQ ID NO: 26653 - DNA, 122 bp, Homo sapiens
  misc_feature (61)..(62): /note="This region represents a CpG dinucleotide"
  misc_feature (61)..(61): /note="Nucleotide may be methylated to form 5-methylcytosine"
acagacattttaaaatgcaaagttagaattgaatgcctggtttgaccccaggtagagagccgatgtgagtgaatcacacatcccaattagttgctgtgtctgtcccaccacacagggaggtt

SEQ ID NO: 26654 - DNA, 122 bp, Homo sapiens
  misc_feature (61)..(62): /note="This region represents a CpG dinucleotide"
  misc_feature (61)..(61): /note="Nucleotide may be methylated to form 5-methylcytosine"
cctctcacacggaaaccacaagtgtcagtttttcttaacttgaaacaaaattattctccccgtcttaccagcagttttccaacacttgctagtttgtgatctttctgtttcataaacttgac

SEQ ID NO: 26655 - DNA, 122 bp, Homo sapiens
  misc_feature (61)..(62): /note="This region represents a CpG dinucleotide"
  misc_feature (61)..(61): /note="Nucleotide may be methylated to form 5-methylcytosine"
ctcacccgtgattgccagcctgcaggttggttcactgggtgctgctgcttctcagaattccgtgactaagccaggagtggtgtttgttctttactgataggtattcttctgcctgctctgct

SEQ ID NO: 26656 - DNA, 122 bp, Homo sapiens
  misc_feature (61)..(62): /note="This region represents a CpG dinucleotide"
  misc_feature (61)..(61): /note="Nucleotide may be methylated to form 5-methylcytosine"
tttccagtactccccacttgacagcctctcaaacacttaggaagtcactttgtcctcccacgcagccatctctgtgttagataggaaaggaacaaatcttatgaggaggagtttaaaagaaa

SEQ ID NO: 26657 - DNA, 122 bp, Homo sapiens
  misc_feature (61)..(62): /note="This region represents a CpG dinucleotide"
  misc_feature (61)..(61): /note="Nucleotide may be methylated to form 5-methylcytosine"
tgtcagtaaaaggaactcaaccgtcaaatgcatagaatgaacatggggtcaactctcctccgtagctctcttccgcatgtgggggaaagggcctagtctaactggcttctgtgatgcagaat

SEQ ID NO: 26658 - DNA, 122 bp, Homo sapiens
  misc_feature (61)..(62): /note="This region represents a CpG dinucleotide"
  misc_feature (61)..(61): /note="Nucleotide may be methylated to form 5-methylcytosine"
cctcctgtcctggttgctctgtgctggactaacttgaagagcagtgatgaaacttccgctcgcttctatggaaatatgagtcagggataagctcccctcctcaccacccatattgggaggag

SEQ ID NO: 26659 - DNA, 122 bp, Homo sapiens
  misc_feature (61)..(62): /note="This region represents a CpG dinucleotide"
  misc_feature (61)..(61): /note="Nucleotide may be methylated to form 5-methylcytosine"
tcatgtctctaacctttcctattgatgtaatcaccgtctcattcattgacgattggagttcgtagattataaccttcctcttatgctctttgtctgttagcactcttagtgattttgatacc

SEQ ID NO: 26660 - DNA, 122 bp, Homo sapiens
  misc_feature (61)..(62): /note="This region represents a CpG dinucleotide"
  misc_feature (61)..(61): /note="Nucleotide may be methylated to form 5-methylcytosine"
ggttttcgtgactgcaagaagggggatcccaagcacgggaagcggaaacgaggccggccccgaaagctgagcaaagagtactgggactgtctcgagggcaagaagagcaagcacggtgagct

SEQ ID NO: 26661 - DNA, 122 bp, Homo sapiens
  misc_feature (61)..(62): /note="This region represents a CpG dinucleotide"
  misc_feature (61)..(61): /note="Nucleotide may be methylated to form 5-methylcytosine"
ttgttatagtagcaagaggaaactaatataagaacacagaaagattctatttaaactctccgtcagctacaaagaagaggagtaacttgctactactaatttatgtaagtgacttagcgata

SEQ ID NO: 26662 - DNA, 122 bp, Homo sapiens
  misc_feature (61)..(62): /note="This region represents a CpG dinucleotide"
  misc_feature (61)..(61): /note="Nucleotide may be methylated to form 5-methylcytosine"
aacaagggcagcctcactttagaaagatcttcacagttgtcagctgggtgcgatggctcacgcctgcaatcctagcactttgggaggccaaggcaggtggatcacctgaggtcaggagttca

SEQ ID NO: 26663 - DNA, 122 bp, Homo sapiens
  misc_feature (61)..(62): /note="This region represents a CpG dinucleotide"
  misc_feature (61)..(61): /note="Nucleotide may be methylated to form 5-methylcytosine"
cctcaacaatcaacagagtcctgactaatagtcccattagaggtttttcccaaaagaaaccgacttccttcaaaggcacattcaaactcctggctctaagaaggcagaaaaatgtgtttaca

SEQ ID NO: 26664 - DNA, 122 bp, Homo sapiens
  misc_feature (61)..(62): /note="This region represents a CpG dinucleotide"
  misc_feature (61)..(61): /note="Nucleotide may be methylated to form 5-methylcytosine"
ggctagttagagccagggcagaaaatagaggtggaggactggaagccatccagggcccagcgggagggatttcaggaactggtgaaaagagagatggggctgatacaaaaacaagggtgagg

SEQ ID NO: 26665 - DNA, 122 bp, Homo sapiens
  misc_feature (61)..(62): /note="This region represents a CpG dinucleotide"
  misc_feature (61)..(61): /note="Nucleotide may be methylated to form 5-methylcytosine"
ttgcagaataagaaaactaatttgtcaggtctccagtgacaactgaggggccacagaagccgccatggggttgacatattgaaatggcttgtttaatgaacactgagaaattaagacatcaa

SEQ ID NO: 26666 - DNA, 122 bp, Homo sapiens
  misc_feature (61)..(62): /note="This region represents a CpG dinucleotide"
  misc_feature (61)..(61): /note="Nucleotide may be methylated to form 5-methylcytosine"
tccagccaacaaccacatgagtaagcttagtagccaaccttccagccccagctgagccatcggatgactgtagccacagatggcagcttgactgccatctcctgaaagatgatgagtcagaa

SEQ ID NO: 26667 - DNA, 122 bp, Homo sapiens
  misc_feature (61)..(62): /note="This region represents a CpG dinucleotide"
  misc_feature (61)..(61): /note="Nucleotide may be methylated to form 5-methylcytosine"
gttaggtctaagttacctgagtcatcattccatgcattcacttccaagaaagcacatgaccggccgagcgcgggggctcacgcctgtaatcccagcactttgggaggctgaggcgggcggat

SEQ ID NO: 26668 - DNA, 122 bp, Homo sapiens
  misc_feature (61)..(62): /note="This region represents a CpG dinucleotide"
  misc_feature (61)..(61): /note="Nucleotide may be methylated to form 5-methylcytosine"
agcagtgactgcctgatgtacgacactacttggtactcatcagttgaccagctggacctgcgtgtcctccagtttgccctacccctcagcatgctgatcgccatgggtgccctgctgctctg

SEQ ID NO: 26669 - DNA, 122 bp, Homo sapiens
  misc_feature (61)..(62): /note="This region represents a CpG dinucleotide"
  misc_feature (61)..(61): /note="Nucleotide may be methylated to form 5-methylcytosine"
ccaaggcctgcagggttttaagcagggttggcagtagggcaagatcaggcttaatggatccgaaagatcagtcacctacagtgttgaaaaggaatctgaggtctgagctggacaacgggtgg

SEQ ID NO: 26670 - DNA, 122 bp, Homo sapiens
  misc_feature (61)..(62): /note="This region represents a CpG dinucleotide"
  misc_feature (61)..(61): /note="Nucleotide may be methylated to form 5-methylcytosine"
gcctatgatttggaacttggaggcgcctaagcattttggtcatatttgctaagcagaaggcgagtgttttctgagtgatgtttggcatacacttccagtctgagggtgtcaaatgccagact

SEQ ID NO: 26671 - DNA, 122 bp, Homo sapiens
  misc_feature (61)..(62): /note="This region represents a CpG dinucleotide"
  misc_feature (61)..(61): /note="Nucleotide may be methylated to form 5-methylcytosine"
gggaaaatgccacagggagaaggaagtctccagctgaactttataacaatttgaaccagacgagaaacctcctggccagaactcgggaaagggcatgaatccagcatgcagactccataggc

SEQ ID NO: 26672 - DNA, 122 bp, Homo sapiens
  misc_feature (61)..(62): /note="This region represents a CpG dinucleotide"
  misc_feature (61)..(61): /note="Nucleotide may be methylated to form 5-methylcytosine"
ccatttccacccactctcttggaactctgctcagctaccatgaaggcaggccctggccaacgtgctgaatgagaagagacatgtaactcagtcactaccctccctcatcacagccaacagct

SEQ ID NO: 26673 - DNA, 122 bp, Homo sapiens
  misc_feature (61)..(62): /note="This region represents a CpG dinucleotide"
  misc_feature (61)..(61): /note="Nucleotide may be methylated to form 5-methylcytosine"
tgtgaaatcggtggcctcatttgttcacttgtatctagcactcctagaaagcaagcactgcgtggaggtccagccacaggaattcacaccaacgggcccagagtcggtcatagtgccctgat

SEQ ID NO: 26674 - DNA, 122 bp, Homo sapiens
  misc_feature (61)..(62): /note="This region represents a CpG dinucleotide"
  misc_feature (61)..(61): /note="Nucleotide may be methylated to form 5-methylcytosine"
aaaaatttgtgacgtaaacttgtggtttagtccgtttgcacactgctgtaaggacataaccgagcctgagtaatttataatggaaagaggtttaattaacttaccattctgcaaggctgcgg

SEQ ID NO: 26675 - DNA, 122 bp, Homo sapiens
  misc_feature (61)..(62): /note="This region represents a CpG dinucleotide"
  misc_feature (61)..(61): /note="Nucleotide may be methylated to form 5-methylcytosine"
gttttataaggtgatgtcaacctgatctctaggtgaatagtctgttaagtcatacagtgccgtatgagagcactgcttgtctcttacgtggctgcatctgcagcacctagaatagtgcttag

SEQ ID NO: 26676 - DNA, 122 bp, Homo sapiens
  misc_feature (61)..(62): /note="This region represents a CpG dinucleotide"
  misc_feature (61)..(61): /note="Nucleotide may be methylated to form 5-methylcytosine"
tgtggccacactgcctggggctctggggacttgactaagttgtgtggactctcggagcctcgtttctcatctgtcaagagggagaagttagtaatcatagctcctgcagagtagttatgagg

SEQ ID NO: 26677 - DNA, 122 bp, Homo sapiens
  misc_feature (61)..(62): /note="This region represents a CpG dinucleotide"
  misc_feature (61)..(61): /note="Nucleotide may be methylated to form 5-methylcytosine"
gaaacttaaattcagagaaattaagaatgatggagcagagcagggattgaaatttagacccgaaggcactgtcttcagcaattttattcagaaatgtggctcctttaactagatggctgtct

SEQ ID NO: 26678 - DNA, 122 bp, Homo sapiens
  misc_feature (61)..(62): /note="This region represents a CpG dinucleotide"
  misc_feature (61)..(61): /note="Nucleotide may be methylated to form 5-methylcytosine"
gtttcagcccagtcatgtccaatatcttttcctgagactctgcactctacagtttgaaaccggaatactaaacctacagcatgcatgccctagcttgtaccctccgtactcatggcagacat

SEQ ID NO: 26679 - DNA, 122 bp, Homo sapiens
  misc_feature (61)..(62): /note="This region represents a CpG dinucleotide"
  misc_feature (61)..(61): /note="Nucleotide may be methylated to form 5-methylcytosine"
gtctcctctgtgaccttagagttgactacagaaaacaatacatttacatgatgaaggtagcgtcaaagatttcagtttattaacaacttggaaagacgctaattctggacccagtaaataca

SEQ ID NO: 26680 - DNA, 122 bp, Homo sapiens
  misc_feature (61)..(62): /note="This region represents a CpG dinucleotide"
  misc_feature (61)..(61): /note="Nucleotide may be methylated to form 5-methylcytosine"
attcaaagccaaggaagacgtggacaccagtctgaggccagggttgcaattctccttcctcgtccacgatcagggaggatctttccaatgcattagttctggcactgctgtgtggggctctg

SEQ ID NO: 26681 - DNA, 122 bp, Homo sapiens
  misc_feature (61)..(62): /note="This region represents a CpG dinucleotide"
  misc_feature (61)..(61): /note="Nucleotide may be methylated to form 5-methylcytosine"
tttcattcattcaagcaccaattctttcactcattcagccagacggtatttctggacttccgtgtttgggtgttaaggggatttcaggatgaataagaaagggacctgcccctgggacttac

SEQ ID NO: 26682 - DNA, 122 bp, Homo sapiens
  misc_feature (61)..(62): /note="This region represents a CpG dinucleotide"
  misc_feature (61)..(61): /note="Nucleotide may be methylated to form 5-methylcytosine"
tctgtattactcatcttgatctggcatttacccttttacaacaatgtcttatgtctgacccgctttaaggattaccttctccgtaaaacctgccctgaactcttgatcttccccaacaacca

SEQ ID NO: 26683 - DNA, 122 bp, Homo sapiens
  misc_feature (61)..(62): /note="This region represents a CpG dinucleotide"
  misc_feature (61)..(61): /note="Nucleotide may be methylated to form 5-methylcytosine"
tgaagtttgttctacgtgcgccccatccctttctaacttagcactcaagtgtattatcagcgccagcactagcttctgcagtacctttgtgcaaattagactctagcaaaataaattacaaa

SEQ ID NO: 26684 - DNA, 122 bp, Homo sapiens
  misc_feature (61)..(62): /note="This region represents a CpG dinucleotide"
  misc_feature (61)..(61): /note="Nucleotide may be methylated to form 5-methylcytosine"
tccagatgtgaatgggacccagccaggggcaacaggctcactcggaggggaatctgaagacgcaagtggaaaactatgcgctgtccgatcgcaaccctccaatctgtccctgtggccgccgg

SEQ ID NO: 26685 - DNA, 122 bp, Homo sapiens
  misc_feature (61)..(62): /note="This region represents a CpG dinucleotide"
  misc_feature (61)..(61): /note="Nucleotide may be methylated to form 5-methylcytosine"
cctcgaaaactcgaggagacacattcagctgctcccatttcacggatgaggaaacaagtacgcaatcctgaagctggtgcaaagcccaggccccctttctttttcaagcgtgcttccagcct

SEQ ID NO: 26686 - DNA, 122 bp, Homo sapiens
  misc_feature (61)..(62): /note="This region represents a CpG dinucleotide"
  misc_feature (61)..(61): /note="Nucleotide may be methylated to form 5-methylcytosine"
gtggtgtcatatgtcttctctgcaagaaaaggcattgttagcaaggcaaacagaaatactcgatacagttatgtataaaccagaggaagcctttgccagagagattgttgacaattgctaga

SEQ ID NO: 26687 - DNA, 122 bp, Homo sapiens
  misc_feature (61)..(62): /note="This region represents a CpG dinucleotide"
  misc_feature (61)..(61): /note="Nucleotide may be methylated to form 5-methylcytosine"
tttctaaatcgcctttgtaatcatcacatacatgatggtgattcattcaatacatgttgccgtgttgagaaggctgacatttttcttaccactattgtaatttctccataaagccctggtac

SEQ ID NO: 26688 - DNA, 122 bp, Homo sapiens
  misc_feature (61)..(62): /note="This region represents a CpG dinucleotide"
  misc_feature (61)..(61): /note="Nucleotide may be methylated to form 5-methylcytosine"
cagtctccctccctctgcaaaccagactcctcctttgcctaactcctttttttattcctgcgtcacaaatacaaaatggagttagctgggagcaaaaacaatctgtctaaaatggctgaatg

SEQ ID NO: 26689 - DNA, 122 bp, Homo sapiens
  misc_feature (61)..(62): /note="This region represents a CpG dinucleotide"
  misc_feature (61)..(61): /note="Nucleotide may be methylated to form 5-methylcytosine"
gccacctttgagctctgccttctctcaatcaagggcagtgtggacacatagagagaggaacgtgctttgagcctgagagattctgatttgagtcaccccagctatgttactatctcaccata

SEQ ID NO: 26690 - DNA, 122 bp, Homo sapiens
  misc_feature (61)..(62): /note="This region represents a CpG dinucleotide"
  misc_feature (61)..(61): /note="Nucleotide may be methylated to form 5-methylcytosine"
cacacacaggattttgagttgggtgttaccctacttatctggtaagtgtagaaaatgagacgaaaagacttactgacctgcccaaggtcatgaaactaataaaggaaggagaggggacccaa

SEQ ID NO: 26691 - DNA, 122 bp, Homo sapiens
  misc_feature (61)..(62): /note="This region represents a CpG dinucleotide"
  misc_feature (61)..(61): /note="Nucleotide may be methylated to form 5-methylcytosine"
gtgcatggcgttgttctctatttggttcttaagctgtaaacctggaaatcacccttgactcgtcctccttgtttatgactgacatctagtcattttttaggtcttccttaactatgtcttga

SEQ ID NO: 26692 - DNA, 122 bp, Homo sapiens
  misc_feature (61)..(62): /note="This region represents a CpG dinucleotide"
  misc_feature (61)..(61): /note="Nucleotide may be methylated to form 5-methylcytosine"
taaatctgcccttcaaggaatattacttttacgtactaaatgggaaccagtaagcttgcccgagcccacacagtgcagaggagaagctagagcacctgataaagataaattctccatttgac

SEQ ID NO: 26693 - DNA, 122 bp, Homo sapiens
  misc_feature (61)..(62): /note="This region represents a CpG dinucleotide"
  misc_feature (61)..(61): /note="Nucleotide may be methylated to form 5-methylcytosine"
cattatccaaacaggtttggcacagggcgtctcaatgagtgggcttagagcaagcagacacgagtttcagaaggtcatgctgtgactaggaagttgtcactctggcatatctgcacagtcca

SEQ ID NO: 26694 - DNA, 122 bp, Homo sapiens
  misc_feature (61)..(62): /note="This region represents a CpG dinucleotide"
  misc_feature (61)..(61): /note="Nucleotide may be methylated to form 5-methylcytosine"
gctgggattatgggtgtgcactaccacgcccagccaaggcttagacattttagaatgaggcgatcctgatttcagttctaccagagtcatgaccccactatgctgctgatgaagactgggga

SEQ ID NO: 26695 - DNA, 122 bp, Homo sapiens
  misc_feature (61)..(62): /note="This region represents a CpG dinucleotide"
  misc_feature (61)..(61): /note="Nucleotide may be methylated to form 5-methylcytosine"
tcatgaattgcttcctgtatgttcatgaattacttcctgtgtgctcatgaactgcttcctcgtgtgtctcctccatctagtgtatgaaaccctaaagagaacagagctcatcccgtattgct

SEQ ID NO: 26696 - DNA, 122 bp, Homo sapiens
  misc_feature (61)..(62): /note="This region represents a CpG dinucleotide"
  misc_feature (61)..(61): /note="Nucleotide may be methylated to form 5-methylcytosine"
cacagtcaaataagcaaatccagtcaagatcattcaagccaagcacaaattaaccaagcccgagagactcataagctaagtaaatgtttaacattaaatgccactgaagttcagcagttgtt

SEQ ID NO: 26697 - DNA, 122 bp, Homo sapiens
  misc_feature (61)..(62): /note="This region represents a CpG dinucleotide"
  misc_feature (61)..(61): /note="Nucleotide may be methylated to form 5-methylcytosine"
tcacgcgagttgtataaagcacagagcagaatccctggcacactcttaagggctcttacacgcattcactgtcagggagcagacatgagactcttggcagcactgatgttgtgcagatgtgg

SEQ ID NO: 26698 - DNA, 122 bp, Homo sapiens
  misc_feature (61)..(62): /note="This region represents a CpG dinucleotide"
  misc_feature (61)..(61): /note="Nucleotide may be methylated to form 5-methylcytosine"
agggactctggcccaacgctcaccggctgttccacatcgatcacgtacttggggccctcccgcttcaccttgtaatgccggaccacgtgcgtcctgcaccaggagaaagcgagtgagtggct

SEQ ID NO: 26699 - DNA, 122 bp, Homo sapiens
  misc_feature (61)..(62): /note="This region represents a CpG dinucleotide"
  misc_feature (61)..(61): /note="Nucleotide may be methylated to form 5-methylcytosine"
taatttcttgaattgggtaatttccaccctctcggctttcagtaatagcagaagcaactacgtaagcagattagccaatagacacaagtttattactttcctcactcatggctaagatgact

SEQ ID NO: 26700 - DNA, 122 bp, Homo sapiens
  misc_feature (61)..(62): /note="This region represents a CpG dinucleotide"
  misc_feature (61)..(61): /note="Nucleotide may be methylated to form 5-methylcytosine"
aggtactgtgatgctaatcatctctgtgggagcagttcctctctccagtacacctcagatcgcagtaaaaagtgacctcttgagattcttgagtatgttttgttgtgtttagtgcagtacca

SEQ ID NO: 26701 - DNA, 122 bp, Homo sapiens
  misc_feature (61)..(62): /note="This region represents a CpG dinucleotide"
  misc_feature (61)..(61): /note="Nucleotide may be methylated to form 5-methylcytosine"
cattagcaaagtaaatctgctgggggaaaaaatatccagcattccagaaagattagcacacgcagtctccagtgtatgagggagttgcgctccaaaagatagtttcaaaagttggaacttag

SEQ ID NO: 26702 - DNA, 122 bp, Homo sapiens
  misc_feature (61)..(62): /note="This region represents a CpG dinucleotide"
  misc_feature (61)..(61): /note="Nucleotide may be methylated to form 5-methylcytosine"
ccaagcttctccctccaccagcaatggcctgcccgcccaacagcaagtactccctgtgtgcgaagccatgccctgacacctgccattcaggattctccggcatgttctgctcagaccggtgc

SEQ ID NO: 26703 - DNA, 122 bp, Homo sapiens
  misc_feature (61)..(62): /note="This region represents a CpG dinucleotide"
  misc_feature (61)..(61): /note="Nucleotide may be methylated to form 5-methylcytosine"
ccaacgaggtcggctcagattctcacttcccctctgggcctggagcagggtccgcatttgcgctcgccgtccaccaccacatcccgaccaggctattgcccggaggctccacatgaccctct

SEQ ID NO: 26704 - DNA, 122 bp, Homo sapiens
  misc_feature (61)..(62): /note="This region represents a CpG dinucleotide"
  misc_feature (61)..(61): /note="Nucleotide may be methylated to form 5-methylcytosine"
gccgcacctgtgcctaggactttacatgtgtatctcatttcatctcttaaatccccgatacgaggtaggttcagttatgatgatcccagttttacaagagaaggaaccatgtgcacagaggc

SEQ ID NO: 26705 - DNA, 122 bp, Homo sapiens
  misc_feature (61)..(62): /note="This region represents a CpG dinucleotide"
  misc_feature (61)..(61): /note="Nucleotide may be methylated to form 5-methylcytosine"
gcaggtatatttttgagaattcctcaagtcagggggcactcctaggggaattcaagtctacgtgtaggacatactttgaaatgagactgctgagtttgcatcttggtcctaccatgtaaggg

SEQ ID NO: 26706 - DNA, 122 bp, Homo sapiens
  misc_feature (61)..(62): /note="This region represents a CpG dinucleotide"
  misc_feature (61)..(61): /note="Nucleotide may be methylated to form 5-methylcytosine"
aactctcagcaaaaagatggaaagagcagaagaggagccatgagtggcatagagaaggctcgagacaagattgggtatcagagttcattcattcagggaccagaggacagtgcaggatcagg

SEQ ID NO: 26707 - DNA, 122 bp, Homo sapiens
  misc_feature (61)..(62): /note="This region represents a CpG dinucleotide"
  misc_feature (61)..(61): /note="Nucleotide may be methylated to form 5-methylcytosine"
gacacttttatatagttctagtggaattattttgcatgttgtaacaagaagcatatattgcgttgtaattttcttgcatggtacaagttgatgtaagaggacagcagccctctgtatccttg

SEQ ID NO: 26708 - DNA, 122 bp, Homo sapiens
  misc_feature (61)..(62): /note="This region represents a CpG dinucleotide"
  misc_feature (61)..(61): /note="Nucleotide may be methylated to form 5-methylcytosine"
cattgttaaattgcctataaatacctggctactcaaatacactctcagtaactaataagtcgaataaagtatttgtcacatgtccatttatatttgcataatattgtctggaaaagcctccc

SEQ ID NO: 26709 - DNA, 122 bp, Homo sapiens
  misc_feature (61)..(62): /note="This region represents a CpG dinucleotide"
  misc_feature (61)..(61): /note="Nucleotide may be methylated to form 5-methylcytosine"
aggagagcaagagtatgattagtcagcaccccaaatctcaagaatggtccctataggatacgctctgtatgttgtaatatgcagatatgtgcaccgtgtgtggtgtgttaagtatacattgt

SEQ ID NO: 26710 - DNA, 122 bp, Homo sapiens
  misc_feature (61)..(62): /note="This region represents a CpG dinucleotide"
  misc_feature (61)..(61): /note="Nucleotide may be methylated to form 5-methylcytosine"
ttcaaatgctttcctggaaacgagcatgctcagagaactgacaaatcattgtccagtgaccgggaggaaatgatcgttgctcttcatttataatgcaaattctgaggtgtctccagaagtgt

SEQ ID NO: 26711 - DNA, 122 bp, Homo sapiens
  misc_feature (61)..(62): /note="This region represents a CpG dinucleotide"
  misc_feature (61)..(61): /note="Nucleotide may be methylated to form 5-methylcytosine"
caggctgtggagacagcgttagtcagcagcctcttctctcatgcatgccctgatctttaacgctccaacgtgcatctgtgacaatgacagcggattcctgactgtggccatggctcaggata

SEQ ID NO: 26712 - DNA, 122 bp, Homo sapiens
  misc_feature (61)..(62): /note="This region represents a CpG dinucleotide"
  misc_feature (61)..(61): /note="Nucleotide may be methylated to form 5-methylcytosine"
agagcatgagtaaatccggggctcaggccagggctcagtagatctgacacctgcatccaacgcaagaaacactgaatgctgaggggaggttcctgggacaaggaccaaaacaccacccctta

SEQ ID NO: 26713 - DNA, 122 bp, Homo sapiens
  misc_feature (61)..(62): /note="This region represents a CpG dinucleotide"
  misc_feature (61)..(61): /note="Nucleotide may be methylated to form 5-methylcytosine"
ctgaacgagacagatgagacaagaaaaaggcctccaccttagtcatggccctcagacagacgaacttcaaacttcggtggttctgaaagaaagaaaggctgggcaggcaacccgcctaacag

SEQ ID NO: 26714 - DNA, 122 bp, Homo sapiens
  misc_feature (61)..(62): /note="This region represents a CpG dinucleotide"
  misc_feature (61)..(61): /note="Nucleotide may be methylated to form 5-methylcytosine"
ccaggtaaaaacttagttgtttacttaaaaaataaacaagacaataaaatgcaagccacacggtgagacaatgtttgcgactcatgcaactgacaaggagatattatgcagaataatttaaa

SEQ ID NO: 26715 - DNA, 122 bp, Homo sapiens
  misc_feature (61)..(62): /note="This region represents a CpG dinucleotide"
  misc_feature (61)..(61): /note="Nucleotide may be methylated to form 5-methylcytosine"
cagaaagagaacaatgcaggccatctatcatagcagcctctaacctagaggtgacttgcccgctgcagcctcatttctcagttctgtaattaccacccctcccacagactggacaccacagc

SEQ ID NO: 26716 - DNA, 122 bp, Homo sapiens
  misc_feature (61)..(62): /note="This region represents a CpG dinucleotide"
  misc_feature (61)..(61): /note="Nucleotide may be methylated to form 5-methylcytosine"
atagacttggactagttactccacctcgctgtgactcaatgtccttttctgtaaatggggcgttgcggcccaggggctgtggtcagatgaagctgcttagagcacatggagtgcttggaggg

SEQ ID NO: 26717 - DNA, 122 bp, Homo sapiens
  misc_feature (61)..(62): /note="This region represents a CpG dinucleotide"
  misc_feature (61)..(61): /note="Nucleotide may be methylated to form 5-methylcytosine"
gaaagccaagtgattaataccattaacagccatacatctcacaattacataaaaattcatcgttggggccgggcgcggtgactcacgcctgtaatcccagcactttggaaggccgaggcggg

SEQ ID NO: 26718 - DNA, 122 bp, Homo sapiens
  misc_feature (61)..(62): /note="This region represents a CpG dinucleotide"
  misc_feature (61)..(61): /note="Nucleotide may be methylated to form 5-methylcytosine"
aaccccatcccaaggacagactgcacagcgtcagaagggacacgccctggggcttgggtgcgtgtatgtctgtgaatgtttgcatgtattttcagcgtttgcttcctcccctcaccactacc

SEQ ID NO: 26719 - DNA, 122 bp, Homo sapiens
  misc_feature (61)..(62): /note="This region represents a CpG dinucleotide"
  misc_feature (61)..(61): /note="Nucleotide may be methylated to form 5-methylcytosine"
gtgtcttctttcatccccaggccatgtgcaatcactataatctgggaactgacaggtcagcgactagaaccaagtttcagctaagccacaaccagttgcaaacccaggataatgttgaactg

SEQ ID NO: 26720 - DNA, 122 bp, Homo sapiens
  misc_feature (61)..(62): /note="This region represents a CpG dinucleotide"
  misc_feature (61)..(61): /note="Nucleotide may be methylated to form 5-methylcytosine"
tgaagcctttcctaaccatcttccaaaccagcacctcagaaatagtctccctcttctgaccgcctgtagcattgtattgtacctaagatcttatcacagtcaaacttgtcaaatactatgtt

SEQ ID NO: 26721 - DNA, 122 bp, Homo sapiens
  misc_feature (61)..(62): /note="This region represents a CpG dinucleotide"
  misc_feature (61)..(61): /note="Nucleotide may be methylated to form 5-methylcytosine"
cccttgttatcagtccatcctctgtgctactgaatccatttttctaaaatgcagatttgacgtcatatctgtgcctaaaagtgctgagtggctccttttcaggatagaattgtaatctctca

SEQ ID NO: 26722 - DNA, 122 bp, Homo sapiens
  misc_feature (61)..(62): /note="This region represents a CpG dinucleotide"
  misc_feature (61)..(61): /note="Nucleotide may be methylated to form 5-methylcytosine"
tccagggggcaaaaagcactaacctgtattgttttaatctgctgaaaacaaccaacttctcgagttcccctgctgtcttctagccagtttcctgtaaatgttgcatgtgacattatacttcc

SEQ ID NO: 26723 - DNA, 122 bp, Homo sapiens
  misc_feature (61)..(62): /note="This region represents a CpG dinucleotide"
  misc_feature (61)..(61): /note="Nucleotide may be methylated to form 5-methylcytosine"
gctggaaagaaatgggagtaatgtggtaataccgagttgcgccccaaggtggctttggtgcgccgtgggtcctggatggactcagaggcacagatcactcaagctattttggctcttctcct

SEQ ID NO: 26724 - DNA, 122 bp, Homo sapiens
  misc_feature (61)..(62): /note="This region represents a CpG dinucleotide"
  misc_feature (61)..(61): /note="Nucleotide may be methylated to form 5-methylcytosine"
ctttgcactcagatgaaactgagtttaatgactacctctggtgggtaagtcccttcccctcgctgagactttgtttcccatctgtcaaatgggagtgtcgatactttgctttattaagagct

SEQ ID NO: 26725 - DNA, 122 bp, Homo sapiens
  misc_feature (61)..(62): /note="This region represents a CpG dinucleotide"
  misc_feature (61)..(61): /note="Nucleotide may be methylated to form 5-methylcytosine"
aattacatctttaaatgaaaaaaaatgtagctgtgatttatctaggaactgagagtacagcgtctggacagagaaggttgatagtgtagccttctgtgatctatgtttatttttaaattatc

SEQ ID NO: 26726 - DNA, 122 bp, Homo sapiens
  misc_feature (61)..(62): /note="This region represents a CpG dinucleotide"
  misc_feature (61)..(61): /note="Nucleotide may be methylated to form 5-methylcytosine"
tcttcctaaccagtcttatttttccactgctcataagccactagttctgcttttcacttgcgtaaggtcttaagcaactttccagctcagaaactaccattgcttcccagagcacaaacatg

SEQ ID NO: 26727 - DNA, 122 bp, Homo sapiens
  misc_feature (61)..(62): /note="This region represents a CpG dinucleotide"
  misc_feature (61)..(61): /note="Nucleotide may be methylated to form 5-methylcytosine"
agctggctgcctcgggagtgccttgctgacggtcgctggagttcgtccatcaggcgactgcggtggggcacggagagcaaccgctgcctggcggagactttgatgtgcggctgaggcctggc

SEQ ID NO: 26728 - DNA, 122 bp, Homo sapiens
  misc_feature (61)..(62): /note="This region represents a CpG dinucleotide"
  misc_feature (61)..(61): /note="Nucleotide may be methylated to form 5-methylcytosine"
tgcctgatcctcagtgtctggaacaggcaagaagcttatctctgtcctctttctcctgtgcgtcattgactgcgttgggatgcctttatgcatgaagcttttgcttcacagttggaacagct

SEQ ID NO: 26729 - DNA, 122 bp, Homo sapiens
  misc_feature (61)..(62): /note="This region represents a CpG dinucleotide"
  misc_feature (61)..(61): /note="Nucleotide may be methylated to form 5-methylcytosine"
gttagcagggcccacccccttttgttctgccctggcttcctctgagaggctcccaggggccgctgccccagatccaccagccccggtagccccaaacactgtttgaggtgctagggtggagg

SEQ ID NO: 26730 - DNA, 122 bp, Homo sapiens
  misc_feature (61)..(62): /note="This region represents a CpG dinucleotide"
  misc_feature (61)..(61): /note="Nucleotide may be methylated to form 5-methylcytosine"
tgcagcaaaattccttaaaaggaataatctaacactcagcatcttttgtttctctcctttcgttctctattaaacccactgcaatgtggcttttatccccatcccacaccaccaaaactgca

SEQ ID NO: 26731 - DNA, 122 bp, Homo sapiens
  misc_feature (61)..(62): /note="This region represents a CpG dinucleotide"
  misc_feature (61)..(61): /note="Nucleotide may be methylated to form 5-methylcytosine"
tcaaccatgaaaggaatagctattgatagttcatgcaaaaccttgaatgaatctggggggcggagagccaatccccaaaggtaacataccgtatgattccatttttataatttttttttttt

SEQ ID NO: 26732 - DNA, 122 bp, Homo sapiens
  misc_feature (61)..(62): /note="This region represents a CpG dinucleotide"
  misc_feature (61)..(61): /note="Nucleotide may be methylated to form 5-methylcytosine"
aattggggcttccacactacacccagactacaccaggagaaacagaatcatagttcacaacgcaaacgaatgccaggaatggtcagtgagtcaaaggaccagtcaaaaacaatcacacttgt

SEQ ID NO: 26733 - DNA, 122 bp, Homo sapiens
  misc_feature (61)..(62): /note="This region represents a CpG dinucleotide"
  misc_feature (61)..(61): /note="Nucleotide may be methylated to form 5-methylcytosine"
tcattattctattccctctgccaattttgtcaactcaatacttaaaggtggaatttgagacgtagatgtttgaccagtccagttgagtaattggtgcagtgcctgtctattcacagagaggt

SEQ ID NO: 26734 - DNA, 122 bp, Homo sapiens
  misc_feature (61)..(62): /note="This region represents a CpG dinucleotide"
  misc_feature (61)..(61): /note="Nucleotide may be methylated to form 5-methylcytosine"
cagttcctccaaataaaatacaaagtttgcaaatactgccaaccactcgggtcatgtcggcggagatagctacaactccagaggcaagaacttctgaagacagtcttcttaaatcaacactg

SEQ ID NO: 26735 - DNA, 122 bp, Homo sapiens
  misc_feature (61)..(62): /note="This region represents a CpG dinucleotide"
  misc_feature (61)..(61): /note="Nucleotide may be methylated to form 5-methylcytosine"
tctgcccgcctgacctcgtgatctgcccgcctcagcctcccaaagtgctgggattacaggcgtgagccacagcacccggccaaaatggggatcattttacaaggtgagaaataatgtttgta

SEQ ID NO: 26736 - DNA, 122 bp, Homo sapiens
  misc_feature (61)..(62): /note="This region represents a CpG dinucleotide"
  misc_feature (61)..(61): /note="Nucleotide may be methylated to form 5-methylcytosine"
gtactcttataagtacgagaaatagagtgataaacacagagactaaagtcccagtcattgcggaattacacaccagtgaagaaaaacagcaacaaacaaggaagtagaaggtagatataatt

SEQ ID NO: 26737 - DNA, 122 bp, Homo sapiens
  misc_feature (61)..(62): /note="This region represents a CpG dinucleotide"
  misc_feature (61)..(61): /note="Nucleotide may be methylated to form 5-methylcytosine"
ggatcccccactcggggacttcctcttcctctcagggcaggtgcagctgccacagtgagacgggcaccccgacccgggcatggaggggggcaaggggcccaggctcagagacttcctgagtg

SEQ ID NO: 26738 - DNA, 122 bp, Homo sapiens
  misc_feature (61)..(62): /note="This region represents a CpG dinucleotide"
  misc_feature (61)..(61): /note="Nucleotide may be methylated to form 5-methylcytosine"
gcttcatctgcctcctggacttcgagcggcaccttgacaggatagcccgaggcagcacggcgttcccgcagacgctgggcctgccgctgggcctcaactcgcttggcttgcagcttgcccag

SEQ ID NO: 26739 - DNA, 122 bp, Homo sapiens
  misc_feature (61)..(62): /note="This region represents a CpG dinucleotide"
  misc_feature (61)..(61): /note="Nucleotide may be methylated to form 5-methylcytosine"
gctccagcagctacgattttgggagtgcccagccattatcttcaaatggctattctctttcgtttggggaaatgcagtggtaaaacatcagagctggtcctgcggaaataacgaagtggcca

SEQ ID NO: 26740 - DNA, 122 bp, Homo sapiens
  misc_feature (61)..(62): /note="This region represents a CpG dinucleotide"
  misc_feature (61)..(61): /note="Nucleotide may be methylated to form 5-methylcytosine"
caggtgtccctgggatgagtcatgccctttccaaagattaagcactgaggccacccttgacgtcatggcaaccgagccacaaccactttattcctaggccaagtttgcacctctgcacacta

SEQ ID NO: 26741 - DNA, 122 bp, Homo sapiens
  misc_feature (61)..(62): /note="This region represents a CpG dinucleotide"
  misc_feature (61)..(61): /note="Nucleotide may be methylated to form 5-methylcytosine"
ggaaagtattttggtccctatacaggccacagaaaaagagagtgttgaacctacatccatcgtttgtcctgggggtggtcccagcatggcttgttcaggaccgtcttggccctgctctgaga

SEQ ID NO: 26742 - DNA, 122 bp, Homo sapiens
  misc_feature (61)..(62): /note="This region represents a CpG dinucleotide"
  misc_feature (61)..(61): /note="Nucleotide may be methylated to form 5-methylcytosine"
tgctttataaagtagtctcagacacagaggtgccttgtttaaattcacctttcccttagccgtattgtaaatacatacccatagtatagggaagggattaccactcacaggttactcatgaa

SEQ ID NO: 26743 - DNA, 122 bp, Homo sapiens
  misc_feature (61)..(62): /note="This region represents a CpG dinucleotide"
  misc_feature (61)..(61): /note="Nucleotide may be methylated to form 5-methylcytosine"
tgagaaggatgctggggcagcatccaggctccaggagacagatctgtgattgttcagccacgtctgcagcaggcacaggctggaggagcagcagtgcctggcatcataggtctgtgtacctt

SEQ ID NO: 26744 - DNA, 122 bp, Homo sapiens
  misc_feature (61)..(62): /note="This region represents a CpG dinucleotide"
  misc_feature (61)..(61): /note="Nucleotide may be methylated to form 5-methylcytosine"
aggtaagtcagttgaagagagaacctgagaaatgtgatcttcaggcttaccactgtggggcgcatagcatgctagaaaaaagtaagtatgaggtttagaagtggagaaatatacactttcca

SEQ ID NO: 26745 - DNA, 122 bp, Homo sapiens
  misc_feature (61)..(62): /note="This region represents a CpG dinucleotide"
  misc_feature (61)..(61): /note="Nucleotide may be methylated to form 5-methylcytosine"
gaggaaataccacaacccacttcactacacaacccacttcaatacacagcctagggcagacgtgggacctgggacagctgaccttgtccctaatgagaaaagccacattaggtctccagtat

SEQ ID NO: 26746 - DNA, 122 bp, Homo sapiens
  misc_feature (61)..(62): /note="This region represents a CpG dinucleotide"
  misc_feature (61)..(61): /note="Nucleotide may be methylated to form 5-methylcytosine"
aaatggagattgtttttatactctatgtgctgtttgtacactgacagcagcatggttattcgccaaataatcagagtatgttggcatttttataaataaagtgcttgggtttgacagtaatc

SEQ ID NO: 26747 - DNA, 122 bp, Homo sapiens
  misc_feature (61)..(62): /note="This region represents a CpG dinucleotide"
  misc_feature (61)..(61): /note="Nucleotide may be methylated to form 5-methylcytosine"
ccccacttcccattcaaggagactaaggcagagagatcaaataacttgcacaaggccacacgaatagtaagtggcagatgcaagagctaaatccagtagtctgagtctgaagctcacaagtt

SEQ ID NO: 26748 - DNA, 122 bp, Homo sapiens
  misc_feature (61)..(62): /note="This region represents a CpG dinucleotide"
  misc_feature (61)..(61): /note="Nucleotide may be methylated to form 5-methylcytosine"
gaagagtgaatcatcttcttgtggtgttttatttgacttcagataacagatttctgccaccggaaaagcagccgttcatatgaagtggatgaacttcctgtcaccgaacaagagctgcagaa

SEQ ID NO: 26749 - DNA, 122 bp, Homo sapiens
  misc_feature (61)..(62): /note="This region represents a CpG dinucleotide"
  misc_feature (61)..(61): /note="Nucleotide may be methylated to form 5-methylcytosine"
ttttttaaacaatactgagaagcaagcagtaagctcttttctcaagccacacctgacttacgtgcattcacatgcccatgcttccaagggaaagccagccccactcctactgtactgaccca

SEQ ID NO: 26750 - DNA, 122 bp, Homo sapiens
  misc_feature (61)..(62): /note="This region represents a CpG dinucleotide"
  misc_feature (61)..(61): /note="Nucleotide may be methylated to form 5-methylcytosine"
tgagatcagctggggaactctctcccaggaaagacaaaccagaagaaacacaaatgacatcgaagtggccaggcgcagtggctcacgcctgtaatcccagcactttgggagcccgaggcagg

SEQ ID NO: 26751 - DNA, 122 bp, Homo sapiens
  misc_feature (61)..(62): /note="This region represents a CpG dinucleotide"
  misc_feature (61)..(61): /note="Nucleotide may be methylated to form 5-methylcytosine"
aaacaaacatgtgatcatccatagtctctaatacttatctacaaccccaagaaggtctttcgttattgttgttttatttttgtttttgtttttagggagttgggtatggagtgatcatgtgg

SEQ ID NO: 26752 - DNA, 122 bp, Homo sapiens
  misc_feature (61)..(62): /note="This region represents a CpG dinucleotide"
  misc_feature (61)..(61): /note="Nucleotide may be methylated to form 5-methylcytosine"
cagggtgtttgttgcttgattaaatcagtgcactcagtgcagcgcggtggagatgcaacacgccaggctcactcctgggcttgaggcccagatgttaatcatagagctgcagtcagaacgcc

SEQ ID NO: 26753 - DNA, 122 bp, Homo sapiens
  misc_feature (61)..(62): /note="This region represents a CpG dinucleotide"
  misc_feature (61)..(61): /note="Nucleotide may be methylated to form 5-methylcytosine"
aagaaaacggcagccacacgctcacactggtagcataatgccatcggttgcccagcattacggggcaacatatacggcatacaacttctccacacatggagctggaatcccccaggccctaa

SEQ ID NO: 26754 - DNA, 122 bp, Homo sapiens
  misc_feature (61)..(62): /note="This region represents a CpG dinucleotide"
  misc_feature (61)..(61): /note="Nucleotide may be methylated to form 5-methylcytosine"
tatcaaagtttatcaaacttcaaagcccataatatttcatcagaactgtgatgattattgcggcaacaaacagcagattgttttaagcaaatttggagttgtattgatccacagctgttagc

SEQ ID NO: 26755 - DNA, 122 bp, Homo sapiens
  misc_feature (61)..(62): /note="This region represents a CpG dinucleotide"
  misc_feature (61)..(61): /note="Nucleotide may be methylated to form 5-methylcytosine"
atgcccagtggtgcccggcaggactttataaagccccaagactcctgcctccctaagccccgcctctgctcaccgtggctcagtctgcttctaaaactgggtcaaagggctcactcagaaca

SEQ ID NO: 26756 - DNA, 122 bp, Homo sapiens
  misc_feature (61)..(62): /note="This region represents a CpG dinucleotide"
  misc_feature (61)..(61): /note="Nucleotide may be methylated to form 5-methylcytosine"
tgtaaaaaatttcttacatcctgattttaaaaaatcagatgatcaggaaacattgagttccgattcctttgttacaacctccactaaagctaagtaacagctgctgtattaagatggggctc

SEQ ID NO: 26757 - DNA, 122 bp, Homo sapiens
  misc_feature (61)..(62): /note="This region represents a CpG dinucleotide"
  misc_feature (61)..(61): /note="Nucleotide may be methylated to form 5-methylcytosine"
aggaggggaaggaaccccacccagtgagaaagccagcatggggcgggcttttgactcatccggaaggcagctggctgctggaaacagaggctggtgttgggagagtcgtagaagcccaggcc

SEQ ID NO: 26758 - DNA, 122 bp, Homo sapiens
  misc_feature (61)..(62): /note="This region represents a CpG dinucleotide"
  misc_feature (61)..(61): /note="Nucleotide may be methylated to form 5-methylcytosine"
ttgtggtttgaatgtttgtctccacaaattcatatggtgaaaccctaccctccaggtgatcgtactagaaggtggggcctttgggaggtgattaggtcacgagggtggagccgcatgaaaag

SEQ ID NO: 26759 - DNA, 122 bp, Homo sapiens
  misc_feature (61)..(62): /note="This region represents a CpG dinucleotide"
  misc_feature (61)..(61): /note="Nucleotide may be methylated to form 5-methylcytosine"
agtggagaggtcaggttacctcttaacgacacaaaagacatctgtgatccggtgaaaccccgtctctactaaaaatacaaaaacttagccgggtgtggtggcgggcgcctgtagctgcttgg

SEQ ID NO: 26760 - DNA, 122 bp, Homo sapiens
  misc_feature (61)..(62): /note="This region represents a CpG dinucleotide"
  misc_feature (61)..(61): /note="Nucleotide may be methylated to form 5-methylcytosine"
acagtcaggttcctatgattcaaaatcaaatccttgcccaacctctacactgcattcactcgtctaaaagccttgaagttgcattacagaaaatctcatcggattatctactattagttttg

SEQ ID NO: 26761 - DNA, 122 bp, Homo sapiens
  misc_feature (61)..(62): /note="This region represents a CpG dinucleotide"
  misc_feature (61)..(61): /note="Nucleotide may be methylated to form 5-methylcytosine"
aatcttccctggttgtcacctgcaatgatgttatgtctgagttgaatgtttctcactgcacgctagtttgctcagaggtaatagaggaggaactgttttctcactttctctttctctttagc

SEQ ID NO: 26762 - DNA, 122 bp, Homo sapiens
  misc_feature (61)..(62): /note="This region represents a CpG dinucleotide"
  misc_feature (61)..(61): /note="Nucleotide may be methylated to form 5-methylcytosine"
gctctgtggtgttggacaccttatttagcttcttgaagtctcagctccctatctggcagccgatacttccctgtaaggattaaagtgagacagtgaataaaagggtttagcttattgcctgg

SEQ ID NO: 26763 - DNA, 122 bp, Homo sapiens
  misc_feature (61)..(62): /note="This region represents a CpG dinucleotide"
  misc_feature (61)..(61): /note="Nucleotide may be methylated to form 5-methylcytosine"
gcaagtggcccccaggctctgctggcatccacttagttccgctgtgaaacagggacactgcgctggtcttgttgaaacagctgtcccataggtttgatgttcccaggatgctagaggagaaa

SEQ ID NO: 26764 - DNA, 122 bp, Homo sapiens
  misc_feature (61)..(62): /note="This region represents a CpG dinucleotide"
  misc_feature (61)..(61): /note="Nucleotide may be methylated to form 5-methylcytosine"
accagttaagagactgttgcaggcactgtagcaataactggttcaggcatgaatcactggcggatgcaaaatccctagggtgataatttgtcagcaaacaggatagtcatggtttcaaagta

SEQ ID NO: 26765 - DNA, 122 bp, Homo sapiens
  misc_feature (61)..(62): /note="This region represents a CpG dinucleotide"
  misc_feature (61)..(61): /note="Nucleotide may be methylated to form 5-methylcytosine"
ttaactttctgaaatgagaagtcctaatataccgaggtgccacaagtcacttaggatttccgtggttatgaaagaagaattgaaacgtctcttccctctggtgggttttcacagcacaactg

SEQ ID NO: 26766 - DNA, 122 bp, Homo sapiens
  misc_feature (61)..(62): /note="This region represents a CpG dinucleotide"
  misc_feature (61)..(61): /note="Nucleotide may be methylated to form 5-methylcytosine"
gcatcagaatttggggccaggtgtgggttacacacagggtctaaggtcgatagcccagaccgtctgaggctatgatgccctgccctctccaccgcaatcctgttcctttgctgtggagaatc

SEQ ID NO: 26767 - DNA, 122 bp, Homo sapiens
  misc_feature (61)..(62): /note="This region represents a CpG dinucleotide"
  misc_feature (61)..(61): /note="Nucleotide may be methylated to form 5-methylcytosine"
ggcaaaagagaagacagacatctaaagctccgacaagccatttggggtgacgtccaggcacgccgcctgcaggacctgtgatctgttctgacatatggatatctgaaaataacccctcctat

SEQ ID NO: 26768 - DNA, 122 bp, Homo sapiens
  misc_feature (61)..(62): /note="This region represents a CpG dinucleotide"
  misc_feature (61)..(61): /note="Nucleotide may be methylated to form 5-methylcytosine"
aagagctctgaaattgtaaatgtatcaccccctccttcttcccccactccccacccctgccggcttttaaactatggcagtagaaaaataggtttcaactttctaggagcacatctctccta

SEQ ID NO: 26769 - DNA, 122 bp, Homo sapiens
  misc_feature (61)..(62): /note="This region represents a CpG dinucleotide"
  misc_feature (61)..(61): /note="Nucleotide may be methylated to form 5-methylcytosine"
cttccttaaaactattctcaatcctgcagccaaagtgatcctattaaaacataaatcagacgtcactcttttcctcaatgccatccaatggcttcccatctcactcagagtcaaaaccaagg

SEQ ID NO: 26770 - DNA, 122 bp, Homo sapiens
  misc_feature (61)..(62): /note="This region represents a CpG dinucleotide"
  misc_feature (61)..(61): /note="Nucleotide may be methylated to form 5-methylcytosine"
tggtggcaaggaataaggagagtgaggaatatgactttgtggcaaatgctttaacttggacgtaagagctaagtctggcattgctgcaattgaatggatactattgtcccaactttgcagaa

SEQ ID NO: 26771 - DNA, 122 bp, Homo sapiens
  misc_feature (61)..(62): /note="This region represents a CpG dinucleotide"
  misc_feature (61)..(61): /note="Nucleotide may be methylated to form 5-methylcytosine"
ggccgactgccttgggtgtcagccacatctgttgagatgcgtgtgcctgacgcccgaacgcgtgccagcgttttctgcgagctgtcatgtgaggggcctggggcgtggcctgctgcgagtgt

SEQ ID NO: 26772 - DNA, 122 bp, Homo sapiens
  misc_feature (61)..(62): /note="This region represents a CpG dinucleotide"
  misc_feature (61)..(61): /note="Nucleotide may be methylated to form 5-methylcytosine"
tgtaactttcctgaggtctcctagtcatgcttcctgtgaaactgtgagtcaattacgtatcgtctctttataaattacccagtctcagggaaaactaccctaaggcaaacattatatgaaag

SEQ ID NO: 26773 - DNA, 122 bp, Homo sapiens
  misc_feature (61)..(62): /note="This region represents a CpG dinucleotide"
  misc_feature (61)..(61): /note="Nucleotide may be methylated to form 5-methylcytosine"
tccacagtctggcttccagagtgacttcattgttctaaattttattccttactagagccgcgtggggaggccattgctattttgctgttatgtggcttgtgtccctgcagcctcttccaatt

SEQ ID NO: 26774 - DNA, 122 bp, Homo sapiens
  misc_feature (61)..(62): /note="This region represents a CpG dinucleotide"
  misc_feature (61)..(61): /note="Nucleotide may be methylated to form 5-methylcytosine"
ccctctagtagtttgcaatttattgtattccttcccaatagttcttgcaaagtacttacccgtgtcctgtatttcacaaatttggtttatgtcacttaattatgttttctttcccacttttc

SEQ ID NO: 26775 - DNA, 122 bp, Homo sapiens
  misc_feature (61)..(62): /note="This region represents a CpG dinucleotide"
  misc_feature (61)..(61): /note="Nucleotide may be methylated to form 5-methylcytosine"
agcaacttgaaaatgcttaagtccggcccccttccttttaggccgtcatttgtttcaatacgttgtgctagactgcccagagtcctgtagcaggcagtatgcacaccccattgaaatattta

SEQ ID NO: 26776 - DNA, 122 bp, Homo sapiens
  misc_feature (61)..(62): /note="This region represents a CpG dinucleotide"
  misc_feature (61)..(61): /note="Nucleotide may be methylated to form 5-methylcytosine"
ttgcagaaatgatttctggaaacacctgtgttcgttgttagcccccttagaatgcccatccggaggcgggctctccctggctcggaaggcctccccgcggagggcctggcttgctgtccgct

SEQ ID NO: 26777 - DNA, 122 bp, Homo sapiens
  misc_feature (61)..(62): /note="This region represents a CpG dinucleotide"
  misc_feature (61)..(61): /note="Nucleotide may be methylated to form 5-methylcytosine"
gccaccagagccacggggccgtgtccctgaccatgtgtaagctcacctcagggaagcatccgaactgcaggtacaaagagaagcgacagaacaagtcttacgtagtggcctgtaagcctccc

SEQ ID NO: 26778 - DNA, 122 bp, Homo sapiens
  misc_feature (61)..(62): /note="This region represents a CpG dinucleotide"
  misc_feature (61)..(61): /note="Nucleotide may be methylated to form 5-methylcytosine"
ccactgcattctcttggtgaaagcaagccacagccctatcccacatttaaggagagaggacgacacaagacagaggctactaggatgttaagttcaatgtcacagacccccacaaccacctc

SEQ ID NO: 26779 - DNA, 122 bp, Homo sapiens
  misc_feature (61)..(62): /note="This region represents a CpG dinucleotide"
  misc_feature (61)..(61): /note="Nucleotide may be methylated to form 5-methylcytosine"
aactccacatggtggacacttgtcactgggaatgattcaggctttaatggggctgctgggcgggagcacagggcttgagggccagaggaagtggagcaggaactgtggcaagaggtagaggg

SEQ ID NO: 26780 - DNA, 122 bp, Homo sapiens
  misc_feature (61)..(62): /note="This region represents a CpG dinucleotide"
  misc_feature (61)..(61): /note="Nucleotide may be methylated to form 5-methylcytosine"
aggtggggcctgatgggaggtgtttgtgtcctcatattgagaaacttctctatttgtttccgggagatctgattgtttttaagaaagcctgttacctcctctcactctctgtgtttgtccct

SEQ ID NO: 26781 - DNA, 122 bp, Homo sapiens
  misc_feature (61)..(62): /note="This region represents a CpG dinucleotide"
  misc_feature (61)..(61): /note="Nucleotide may be methylated to form 5-methylcytosine"
cacataagctatataaatctctggagtatatacaggagatgtttcttaatttacattcttcgttacatgttggatgaggtaatctggcaaaattgcatttagagaccacatctgttatcctc

SEQ ID NO: 26782 - DNA, 122 bp, Homo sapiens
  misc_feature (61)..(62): /note="This region represents a CpG dinucleotide"
  misc_feature (61)..(61): /note="Nucleotide may be methylated to form 5-methylcytosine"
aaaattcctcctttatttttattcctgcaccttcagggtggcttatgatgccttaattaacgtttttatctagtcacaattgtgactgctttccagggccatggtaggaggggcattttata

SEQ ID NO: 26783 - DNA, 122 bp, Homo sapiens
  misc_feature (61)..(62): /note="This region represents a CpG dinucleotide"
  misc_feature (61)..(61): /note="Nucleotide may be methylated to form 5-methylcytosine"
atggtattggattagagtccccttatgaagtaggcttttaaaatgttagtaagcttgttacgaatgcaggtttctaggctttggccacagatcctgagtcatagttggtctgagatgaaccc

SEQ ID NO: 26784 - DNA, 122 bp, Homo sapiens
  misc_feature (61)..(62): /note="This region represents a CpG dinucleotide"
  misc_feature (61)..(61): /note="Nucleotide may be methylated to form 5-methylcytosine"
aaccatagtacactggattttatgtttaagcagcactgatcctcgatagttcagaactcccgcactgaagtccagcgtaggcaggtaaggacaacctggagccaggcattaatactcacttc

SEQ ID NO: 26785 - DNA, 122 bp, Homo sapiens
  misc_feature (61)..(62): /note="This region represents a CpG dinucleotide"
  misc_feature (61)..(61): /note="Nucleotide may be methylated to form 5-methylcytosine"
gtggcttttccacaggccctggtgctggctgtttatcttccttccctgtacttgaggcagcggactcagatttcaaagcctttttggccatctgggaaaggaaggatgtcatcaggaagaag

SEQ ID NO: 26786 - DNA, 122 bp, Homo sapiens
  misc_feature (61)..(62): /note="This region represents a CpG dinucleotide"
  misc_feature (61)..(61): /note="Nucleotide may be methylated to form 5-methylcytosine"
ggtaagtgtgggcggggctgacgtgagcctggtacaggttccccccacatcgaatctctacgttcaggggcccgtggccctcgggaggtgggagagctgggagtgaggcctcctgtgtgggg

SEQ ID NO: 26787 - DNA, 122 bp, Homo sapiens
  misc_feature (61)..(62): /note="This region represents a CpG dinucleotide"
  misc_feature (61)..(61): /note="Nucleotide may be methylated to form 5-methylcytosine"
attcatcatctcaacttgggtgccaaatatgcacctcaaactatacattctaaacctgctcgcctgcagtctttcctagtttagctcatggcaatttcatccttctggttgattggatccaa

SEQ ID NO: 26788 - DNA, 122 bp, Homo sapiens
  misc_feature (61)..(62): /note="This region represents a CpG dinucleotide"
  misc_feature (61)..(61): /note="Nucleotide may be methylated to form 5-methylcytosine"
taaggaagaaaaggaagtggtaaactctgaagatagaacctcaattcccttgctgagtgacgcggtcaatgagcaccaatcgcctacgggaggccagaaaaggctgcgtggtgctcccctct

SEQ ID NO: 26789 - DNA, 122 bp, Homo sapiens
  misc_feature (61)..(62): /note="This region represents a CpG dinucleotide"
  misc_feature (61)..(61): /note="Nucleotide may be methylated to form 5-methylcytosine"
acgggggctgcagtgctgaatacctctgggacgcttgggaactgtgcccctgtttacagacggcaagcccttagtggtagggccctgagattctgagaaacataaggtctgctttatttaat

SEQ ID NO: 26790 - DNA, 122 bp, Homo sapiens
  misc_feature (61)..(62): /note="This region represents a CpG dinucleotide"
  misc_feature (61)..(61): /note="Nucleotide may be methylated to form 5-methylcytosine"
agagttctctccttgtaagtgactaaccttctcccttttggtacacaatcctcagatgaacggagatgattcattaggccattctagcttaatggatgcatcactgtgcaaccacgcaaatg

SEQ ID NO: 26791 - DNA, 122 bp, Homo sapiens
  misc_feature (61)..(62): /note="This region represents a CpG dinucleotide"
  misc_feature (61)..(61): /note="Nucleotide may be methylated to form 5-methylcytosine"
ttgaaaataaacattgtttaacctgggttttagtagggggtgtgtttttttagtctacttcgttctgtttgcttttcaggtactttgaactcaagtaaacaaaagggaagattttctcgttg

SEQ ID NO: 26792 - DNA, 122 bp, Homo sapiens
  misc_feature (61)..(62): /note="This region represents a CpG dinucleotide"
  misc_feature (61)..(61): /note="Nucleotide may be methylated to form 5-methylcytosine"
ggaattgaaaaacatttataatgtgacataagcaggcattttgagagctagaattgcaaacgtgcatccatccctaagctgttcaggttgtcagccatactgcttccctatctgcgctgttt

SEQ ID NO: 26793 - DNA, 122 bp, Homo sapiens
  misc_feature (61)..(62): /note="This region represents a CpG dinucleotide"
  misc_feature (61)..(61): /note="Nucleotide may be methylated to form 5-methylcytosine"
ctcagaagaaatcatgcgacacatgactgtgtttctcattcctagaaaggaggcacatgacgagatgattatatcatacagcctaggtgtgttgtaggctataccatctaggtttgtgtaag

SEQ ID NO: 26794 - DNA, 122 bp, Homo sapiens
  misc_feature (61)..(62): /note="This region represents a CpG dinucleotide"
  misc_feature (61)..(61): /note="Nucleotide may be methylated to form 5-methylcytosine"
gctggtcctcatctacctgattcagaaagagccagctattgtcatctgattttagctggacggtacagggcttactgcccaggtttaccaggtaccagcctaggctagacctgttctgtgca

SEQ ID NO: 26795 - DNA, 122 bp, Homo sapiens
  misc_feature (61)..(62): /note="This region represents a CpG dinucleotide"
  misc_feature (61)..(61): /note="Nucleotide may be methylated to form 5-methylcytosine"
tcacgacctcaactcagtaaggcctgagattctttcgaaaaggagctttgcttcccatgacgcagagggaagtgtcaactgggatatttctggtaaaactgaaagcaagaaaagcagggtgc

SEQ ID NO: 26796 - DNA, 122 bp, Homo sapiens
  misc_feature (61)..(62): /note="This region represents a CpG dinucleotide"
  misc_feature (61)..(61): /note="Nucleotide may be methylated to form 5-methylcytosine"
gagagagaactggagaaggttaagctttgtgccttattacagctgggcccttccagatcccgtgactaagaactgccatgtcctgactgagaagcagggaggcgtgtgacacacaggaaggg

SEQ ID NO: 26797 - DNA, 122 bp, Homo sapiens
  misc_feature (61)..(62): /note="This region represents a CpG dinucleotide"
  misc_feature (61)..(61): /note="Nucleotide may be methylated to form 5-methylcytosine"
tggcacatttgaagacataaatttgctgtggaacaaaccatacactgttctcaatcttatcgtagcatttgaatggtatgtgtatgcgtgcagtacagggagaagggtgtataggcctgtca

SEQ ID NO: 26798 - DNA, 122 bp, Homo sapiens
  misc_feature (61)..(62): /note="This region represents a CpG dinucleotide"
  misc_feature (61)..(61): /note="Nucleotide may be methylated to form 5-methylcytosine"
gatcctcccgccttcgttagaacagcctcttccagatgagcgctgcttcttgtcctcatgcgtcctaagttgcaatgatgatgatgatgatgaccacaccagactcagtgccaggcactgct

SEQ ID NO: 26799 - DNA, 122 bp, Homo sapiens
  misc_feature (61)..(62): /note="This region represents a CpG dinucleotide"
  misc_feature (61)..(61): /note="Nucleotide may be methylated to form 5-methylcytosine"
cctcctggtgggcaggcagggctggccgaggactcctgggctcactgcttcctggctccccgggataccagctctgcccttgtatttataagaagaggaggatccaggaagtcccagggcag

SEQ ID NO: 26800 - DNA, 122 bp, Homo sapiens
  misc_feature (61)..(62): /note="This region represents a CpG dinucleotide"
  misc_feature (61)..(61): /note="Nucleotide may be methylated to form 5-methylcytosine"
atgtattgtgtggactgaccagcatctcacatgtaggagctttctgggggctgtggctcccggggtcctgtgggaagaatagtgaggtgcacacaatgcaacgggatccttagggctatttt

SEQ ID NO: 26801 - DNA, 122 bp, Homo sapiens
  misc_feature (61)..(62): /note="This region represents a CpG dinucleotide"
  misc_feature (61)..(61): /note="Nucleotide may be methylated to form 5-methylcytosine"
tctttctctctaccactgactcacagagtttgaggttcaatttcacctccctctgagagccgcttgtcttcaagtcccagttcacagccacccatcccgggagccccacccctgttccgcat

SEQ ID NO: 26802 - DNA, 122 bp, Homo sapiens
  misc_feature (61)..(62): /note="This region represents a CpG dinucleotide"
  misc_feature (61)..(61): /note="Nucleotide may be methylated to form 5-methylcytosine"
agctttaatattgatagcatctttgtttcaccacttaagagccagctatttgactgaattcgattcttagggctgctgtaacaaattattacaaactgggtagcttaaaacaacggaaactc

SEQ ID NO: 26803 - DNA, 122 bp, Homo sapiens
  misc_feature (61)..(62): /note="This region represents a CpG dinucleotide"
  misc_feature (61)..(61): /note="Nucleotide may be methylated to form 5-methylcytosine"
ccgagtcagagtacccctgaggggtaatgctctgcaagtaagcccggttcatcagcagctcggtgggttccaagtgccctttctcgcgcgcctcgcgctccgccgcttcccgctcctccgcc

SEQ ID NO: 26804 - DNA, 122 bp, Homo sapiens
  misc_feature (61)..(62): /note="This region represents a CpG dinucleotide"
  misc_feature (61)..(61): /note="Nucleotide may be methylated to form 5-methylcytosine"
tttttgttttcatttcactgatgaggaagctgatgattaaagaggttaaatgacttgtcccgggtcatacttagtcttgagtaagcaagattaagtcttctgactcttaattctgctttttc

SEQ ID NO: 26805 - DNA, 122 bp, Homo sapiens
  misc_feature (61)..(62): /note="This region represents a CpG dinucleotide"
  misc_feature (61)..(61): /note="Nucleotide may be methylated to form 5-methylcytosine"
ttaacatagcatttaaagagcggcatgaattagaggaaagacatggaacacacaggtagtcggtttgagatcatcggcttaaaagtatcctaggatggtaatgacccagaagtatttccagt

SEQ ID NO: 26806 - DNA, 122 bp, Homo sapiens
  misc_feature (61)..(62): /note="This region represents a CpG dinucleotide"
  misc_feature (61)..(61): /note="Nucleotide may be methylated to form 5-methylcytosine"
tgtgtgtgtgtgtgtgtgtgtgtgtgtgtgtgtgtgtgtgtacgtgcacgtgtgtgtttacgagatgctcttgatgggaagagggattatatactggaatgggtgactcagggagagtgtcc

SEQ ID NO: 26807 - DNA, 122 bp, Homo sapiens
  misc_feature (61)..(62): /note="This region represents a CpG dinucleotide"
  misc_feature (61)..(61): /note="Nucleotide may be methylated to form 5-methylcytosine"
gtggctgtttcccttaatgttttgtttgctggtgagtttctgctgtcagtttcctcattccgtctatcacctgattgagacttggagcatgtatactgatagctgtaagaatttttttccag

SEQ ID NO: 26808 - DNA, 122 bp, Homo sapiens
  misc_feature (61)..(62): /note="This region represents a CpG dinucleotide"
  misc_feature (61)..(61): /note="Nucleotide may be methylated to form 5-methylcytosine"
ggcagatacctaggagagagattgctgtgttgtctgaagctttcaagctgttctccagagcggctacaccatccccttccccctgcaatgggtgggaggtcacgagcacctgctgctccagc

SEQ ID NO: 26809 - DNA, 122 bp, Homo sapiens
  misc_feature (61)..(62): /note="This region represents a CpG dinucleotide"
  misc_feature (61)..(61): /note="Nucleotide may be methylated to form 5-methylcytosine"
agcagaagaaagagtaccagactggagatagcaatataattacagaaaatgggaagtgaccgcacagaccagagaaatcagaaacctacatctgccgggggttggggtgtgtgtgtgtgtgt

SEQ ID NO: 26810 - DNA, 122 bp, Homo sapiens
  misc_feature (61)..(62): /note="This region represents a CpG dinucleotide"
  misc_feature (61)..(61): /note="Nucleotide may be methylated to form 5-methylcytosine"
tcatcttacattgacatgtagaataatttttcctccactctcatcctgttggatcctgcacgtggtgctggctcacttccttcttctgaaaccttcctccaaggttttgtgacacagcactt

SEQ ID NO: 26811 - DNA, 122 bp, Homo sapiens
  misc_feature (61)..(62): /note="This region represents a CpG dinucleotide"
  misc_feature (61)..(61): /note="Nucleotide may be methylated to form 5-methylcytosine"
agaagcaacattgcacctagctcttctttgccaagcacataactgaggaagaccttgaatcgccatttcaatcacagtagaaagttaaaatgcactaatccatactgtacatgtttttccac

SEQ ID NO: 26812 - DNA, 122 bp, Homo sapiens
  misc_feature (61)..(62): /note="This region represents a CpG dinucleotide"
  misc_feature (61)..(61): /note="Nucleotide may be methylated to form 5-methylcytosine"
aatggctaaattgaggtaattagcatatgtgattaactttagactttaaggatatgtactcgtcataatggtctctattagccaggaacctgacaggaaacagatggctcattcaaattaga

SEQ ID NO: 26813 - DNA, 122 bp, Homo sapiens
  misc_feature (61)..(62): /note="This region represents a CpG dinucleotide"
  misc_feature (61)..(61): /note="Nucleotide may be methylated to form 5-methylcytosine"
ctgtccctgccaagcagtcctgttcaggtcaatggcggtacactgcctctccctaggcaccgccttccctgaggcccttaggcagggctagggagttgcttgcacagtccttcccttagtat

SEQ ID NO: 26814 - DNA, 122 bp, Homo sapiens
  misc_feature (61)..(62): /note="This region represents a CpG dinucleotide"
  misc_feature (61)..(61): /note="Nucleotide may be methylated to form 5-methylcytosine"
gcacatcattgcaatgcaaggcaggaaatacaccacagaaatatcttagggaatgcaccacggtagcaaagataggagattagattttattgtaagtgtaaagagaagccactggagagtat

SEQ ID NO: 26815 - DNA, 122 bp, Homo sapiens
  misc_feature (61)..(62): /note="This region represents a CpG dinucleotide"
  misc_feature (61)..(61): /note="Nucleotide may be methylated to form 5-methylcytosine"
accaacaactgcccgttcaggtcaaggtccccatctacaggagaaagggatgtgttctgtcgtaaccaagaaggaaatacacgcaggttcaggtcaaggtccccgtccacaggagaaaggga

SEQ ID NO: 26816 - DNA, 122 bp, Homo sapiens
  misc_feature (61)..(62): /note="This region represents a CpG dinucleotide"
  misc_feature (61)..(61): /note="Nucleotide may be methylated to form 5-methylcytosine"
gtgcagactggagccagatggtacacccagaccttcccagcttaagccacctggtctcagcgaggcccaggccacctggatgcggggatgccacttagcttccatgtgtgtcagcttccttt

SEQ ID NO: 26817 - DNA, 122 bp, Homo sapiens
  misc_feature (61)..(62): /note="This region represents a CpG dinucleotide"
  misc_feature (61)..(61): /note="Nucleotide may be methylated to form 5-methylcytosine"
catgtttttttgactctgcttgaagagactgcacaactttgatcaacaaaaagatactcccgcagatccagacttgccacccagatttataatatagggcttcctctagatgtcttttttct

SEQ ID NO: 26818 - DNA, 122 bp, Homo sapiens
  misc_feature (61)..(62): /note="This region represents a CpG dinucleotide"
  misc_feature (61)..(61): /note="Nucleotide may be methylated to form 5-methylcytosine"
tctctaatgcttactcagtatactcatatgaaaaatgagggcaatccctaagctacttcacgggactatcaggagacttaaataagacaatgtgagggactgggcgcggtggctcatggctg

SEQ ID NO: 26819 - DNA, 122 bp, Homo sapiens
  misc_feature (61)..(62): /note="This region represents a CpG dinucleotide"
  misc_feature (61)..(61): /note="Nucleotide may be methylated to form 5-methylcytosine"
ttcctgggagtttcagtggtggccagagagtttaaatgaagccctactttggggcaggagcgggaggaaactagatgaggtcagctgtctccactttctgatcctgacgtgacatctaaggg

SEQ ID NO: 26820 - DNA, 122 bp, Homo sapiens
  misc_feature (61)..(62): /note="This region represents a CpG dinucleotide"
  misc_feature (61)..(61): /note="Nucleotide may be methylated to form 5-methylcytosine"
gctggggtgggcttggccatgaagtgactgaagggaggcaccagggcagctcagccagggcgtgggccatcatccagttcctggtagatattgtggaatggtttgttttgtttgagagagag

SEQ ID NO: 26821 - DNA, 122 bp, Homo sapiens
  misc_feature (61)..(62): /note="This region represents a CpG dinucleotide"
  misc_feature (61)..(61): /note="Nucleotide may be methylated to form 5-methylcytosine"
gctctggactgtctctttaaaagtccttctggttgtaactgaagcagtaactgaagcagccgctgaagctgttactaggggcaacctggcaagccatagtgcattaaattaaattaaacagg

SEQ ID NO: 26822 - DNA, 122 bp, Homo sapiens
  misc_feature (61)..(62): /note="This region represents a CpG dinucleotide"
  misc_feature (61)..(61): /note="Nucleotide may be methylated to form 5-methylcytosine"
aaagcctgcatcgctaagcctaacagtcaacaaaaagaaagcagaatgaagacaagaaagcggtaagaaatgggaagagacatgtagcacagattggcttcaatgtcatcttaaaatcaaga

SEQ ID NO: 26823 - DNA, 122 bp, Homo sapiens
  misc_feature (61)..(62): /note="This region represents a CpG dinucleotide"
  misc_feature (61)..(61): /note="Nucleotide may be methylated to form 5-methylcytosine"
agcagaaaatccagattctagaaacagatgacatgcgccctgagatgacgccctaacatgcgccctgacacgcgcccagggatgacaggcatccttttgaagcatttacttgagaagaagtt

SEQ ID NO: 26824 - DNA, 122 bp, Homo sapiens
  misc_feature (61)..(62): /note="This region represents a CpG dinucleotide"
  misc_feature (61)..(61): /note="Nucleotide may be methylated to form 5-methylcytosine"
caaaaaaaaagagtcactttctaggcttgtcagagagaaagtgggtgtgtccattactcacggtctaacactggggtactgttcagttctgctgacaagttgtatgctgagcagtttttgtc

SEQ ID NO: 26825 - DNA, 122 bp, Homo sapiens
  misc_feature (61)..(62): /note="This region represents a CpG dinucleotide"
  misc_feature (61)..(61): /note="Nucleotide may be methylated to form 5-methylcytosine"
caaataccatgatacattccatttgaggtcctattcagtagggaggatgaatcatttgagcgtggctttttagtatgttaaaagcaaataaagtgagttatgttaagtattccttattttga

SEQ ID NO: 26826 - DNA, 122 bp, Homo sapiens
  misc_feature (61)..(62): /note="This region represents a CpG dinucleotide"
  misc_feature (61)..(61): /note="Nucleotide may be methylated to form 5-methylcytosine"
aggataacacccatcagagctgcagcagtccagttgtgcaaggcatttaatgcccagtcacgcagtctgaatccaacctgaagtctgcttgtcaagccattagccttatccctgtggcgtct

SEQ ID NO: 26827 - DNA, 122 bp, Homo sapiens
  misc_feature (61)..(62): /note="This region represents a CpG dinucleotide"
  misc_feature (61)..(61): /note="Nucleotide may be methylated to form 5-methylcytosine"
agaatcttaaaatgttttcattgtgaaagactggcaactctgctccacactctctagtgacgtcccatttctgtctgaataaaaaagcacagtgcttatgatggtggatactagctacagca

SEQ ID NO: 26828 - DNA, 122 bp, Homo sapiens
  misc_feature (61)..(62): /note="This region represents a CpG dinucleotide"
  misc_feature (61)..(61): /note="Nucleotide may be methylated to form 5-methylcytosine"
tgatctgagagctcccacagttggggtcctccactctggacaaatagattgccttgtcttcgtgacaatttacttttcttctttggggatctgtgtggaaagttaaaataagtcatagccct

SEQ ID NO: 26829 - DNA, 122 bp, Homo sapiens
  misc_feature (61)..(62): /note="This region represents a CpG dinucleotide"
  misc_feature (61)..(61): /note="Nucleotide may be methylated to form 5-methylcytosine"
gggtttagctgtcttgagggctggtgcctgttctgttcattcagcttccctctgatgatgcgtggcagagtgtgggaggacacgtgcctagcatttttacaatatgccttttcttttagccc

SEQ ID NO: 26830 - DNA, 122 bp, Homo sapiens
  misc_feature (61)..(62): /note="This region represents a CpG dinucleotide"
  misc_feature (61)..(61): /note="Nucleotide may be methylated to form 5-methylcytosine"
tctgaaacccttaaggataagctggaaccaaaggacagactggaacttgcatgggtcttacgctccttctaagccttcatctttgatgatgcatgatctgcaggagaaactgggacctttca

SEQ ID NO: 26831 - DNA, 122 bp, Homo sapiens
  misc_feature (61)..(62): /note="This region represents a CpG dinucleotide"
  misc_feature (61)..(61): /note="Nucleotide may be methylated to form 5-methylcytosine"
agattgagcaagtccaataaacatttaacagcagtgacatctttactctgagatctaacacgatatattgtgatttcagctctgagaaaatcatctgatggcaatgataaaaatgcacacca

SEQ ID NO: 26832 - DNA, 122 bp, Homo sapiens
  misc_feature (61)..(62): /note="This region represents a CpG dinucleotide"
  misc_feature (61)..(61): /note="Nucleotide may be methylated to form 5-methylcytosine"
tcttatgtattaatagtagttaataatacatttaccaagaattaaatttgtttaaaatttcgcagttggggcagagtttaccaaatgtggagtgagcctatctgttgtgaaatagaactcac

SEQ ID NO: 26833 - DNA, 122 bp, Homo sapiens
  misc_feature (61)..(62): /note="This region represents a CpG dinucleotide"
  misc_feature (61)..(61): /note="Nucleotide may be methylated to form 5-methylcytosine"
accctaggtcatctggcctaattccttcatttgcagaagaggagacagacccagaaggctcggtgattgccccaagtcacatggctatgacagttgtgaccagccactccttctctgatgct

SEQ ID NO: 26834 - DNA, 122 bp, Homo sapiens
  misc_feature (61)..(62): /note="This region represents a CpG dinucleotide"
  misc_feature (61)..(61): /note="Nucleotide may be methylated to form 5-methylcytosine"
tgcctagtttggcttccaaaggcccttcacaaatcatacgtggggacttgtagcctaggacgtgaacctgtcaggtcaggctagactggcctgcttttgaaagtgagcccagtgtgtgtgca

SEQ ID NO: 26835 - DNA, 122 bp, Homo sapiens
  misc_feature (61)..(62): /note="This region represents a CpG dinucleotide"
  misc_feature (61)..(61): /note="Nucleotide may be methylated to form 5-methylcytosine"
tctccacaacaaagaatatccagcccaaaatgtcagtagtgccactgttgataaaccctacgtagatacaaacttgaataagactcttggcttcctcagtgacttaacgttcatcctgtgta

SEQ ID NO: 26836 - DNA, 122 bp, Homo sapiens
  misc_feature (61)..(62): /note="This region represents a CpG dinucleotide"
  misc_feature (61)..(61): /note="Nucleotide may be methylated to form 5-methylcytosine"
tactaaacattaaactgacctcttgccttaaccagccccactcctacttccacatcaaaacggcattagctctctcgcagggaaaggcttagctacttcataagggccaccaaaatactgcc

SEQ ID NO: 26837 - DNA, 122 bp, Homo sapiens
  misc_feature (61)..(62): /note="This region represents a CpG dinucleotide"
  misc_feature (61)..(61): /note="Nucleotide may be methylated to form 5-methylcytosine"
ggcagagaatatttccctgatggattgactttgggcttggcctgtgactcgctatgactccggaatgtaagtggaagtgacaattgccagtttcccttatgtaattctcctcttcctttgag

SEQ ID NO: 26838 - DNA, 122 bp, Homo sapiens
  misc_feature (61)..(62): /note="This region represents a CpG dinucleotide"
  misc_feature (61)..(61): /note="Nucleotide may be methylated to form 5-methylcytosine"
tataatccattgtgtgaatctactgctacatacacagagccactaaagaattactcataacgcactagtgagcattcttgtacctgtctccaggtaggcttgccagacttttaaatcttttg

SEQ ID NO: 26839 - DNA, 122 bp, Homo sapiens
  misc_feature (61)..(62): /note="This region represents a CpG dinucleotide"
  misc_feature (61)..(61): /note="Nucleotide may be methylated to form 5-methylcytosine"
gtcaggaaatggtggcttgtataaatacctgagacaagagaataatcatgcagattgatgcgcagaagacatgtgatgtttcttgactgattatggcacctggcacattctctctctggctt

SEQ ID NO: 26840 - DNA, 122 bp, Homo sapiens
  misc_feature (61)..(62): /note="This region represents a CpG dinucleotide"
  misc_feature (61)..(61): /note="Nucleotide may be methylated to form 5-methylcytosine"
tactggcaggtctggcagcatctggcagtttccgtgacatatttaggacactggactattcggcaaagctctgcaacccattgcctagggctttgttttcctagatgaactgagtacctcct

SEQ ID NO: 26841 - DNA, 122 bp, Homo sapiens
  misc_feature (61)..(62): /note="This region represents a CpG dinucleotide"
  misc_feature (61)..(61): /note="Nucleotide may be methylated to form 5-methylcytosine"
tcgaatatttcaccttccggtcctgcgtgggccgagaggattgccgtacgcatgtctgtacgtatgcatgtaactcacagccccttcctgcccgaacatgttggaggccttttggaagctgt

SEQ ID NO: 26842 - DNA, 122 bp, Homo sapiens
  misc_feature (61)..(62): /note="This region represents a CpG dinucleotide"
  misc_feature (61)..(61): /note="Nucleotide may be methylated to form 5-methylcytosine"
caaggctacaagaaaacctggcctttccctgacactgccttggccttgattgcctcagtgcggagagtaaaacaagctgtcagactcagctcctgccctatccttgagctctaataacctca

SEQ ID NO: 26843 - DNA, 122 bp, Homo sapiens
  misc_feature (61)..(62): /note="This region represents a CpG dinucleotide"
  misc_feature (61)..(61): /note="Nucleotide may be methylated to form 5-methylcytosine"
cttagttccattttacagataacgaaactaatagcttcaattgcaccaagttacagtgctcgtaactggtgggaccaggattttaactcaggcactctgacagcaaagcccacattctaacc

SEQ ID NO: 26844 - DNA, 122 bp, Homo sapiens
  misc_feature (61)..(62): /note="This region represents a CpG dinucleotide"
  misc_feature (61)..(61): /note="Nucleotide may be methylated to form 5-methylcytosine"
gaaccggcctctggctccaggaggcaattctctttgccaagaccaatggagctggctgtgcgtgctgtctacgagtgccagctcctgagggttggcagataaatgctctggatgcctcacgc

SEQ ID NO: 26845 - DNA, 122 bp, Homo sapiens
  misc_feature (61)..(62): /note="This region represents a CpG dinucleotide"
  misc_feature (61)..(61): /note="Nucleotide may be methylated to form 5-methylcytosine"
tcaccttcttaccttgcttacaaacttcttgagagatgaatccatatcctgttacacttacgtggttattttgtttgctgttcaaagcaaccttaggaagtaggccttagccccattttcag

SEQ ID NO: 26846 - DNA, 122 bp, Homo sapiens
  misc_feature (61)..(62): /note="This region represents a CpG dinucleotide"
  misc_feature (61)..(61): /note="Nucleotide may be methylated to form 5-methylcytosine"
gcaacagaccatttccgctaaatttagtgactccaggaaggccagtgaagaaataacacacgtagcaaccagagactgtgttgtaatatgttggctgacagcagggtactttctgtgatgct

SEQ ID NO: 26847 - DNA, 122 bp, Homo sapiens
  misc_feature (61)..(62): /note="This region represents a CpG dinucleotide"
  misc_feature (61)..(61): /note="Nucleotide may be methylated to form 5-methylcytosine"
atgggcatggagctgtataaatgccggtatccttacaccaaatgatctcacacagctctgcgtttgtagttgaacttacttcacctactgctgtcggcaggggacctgagcctgccagtttt

SEQ ID NO: 26848 - DNA, 122 bp, Homo sapiens
  misc_feature (61)..(62): /note="This region represents a CpG dinucleotide"
  misc_feature (61)..(61): /note="Nucleotide may be methylated to form 5-methylcytosine"
atatctatatagacaacaataaaaacagactgtaattgtagttgcagtgattacaacatacgttagaagcctcaggaaataagtcatcctagagtggctcaatgtctttagagtaagacata

SEQ ID NO: 26849 - DNA, 122 bp, Homo sapiens
  misc_feature (61)..(62): /note="This region represents a CpG dinucleotide"
  misc_feature (61)..(61): /note="Nucleotide may be methylated to form 5-methylcytosine"
ggtctcactatgtcacccaggctggttttgaaatcctcagctaaagtgatccttctggatcggcttcccaaagtactgggattacaggtgtgagtcactgcaccagggccattcagtcttat

SEQ ID NO: 26850 - DNA, 122 bp, Homo sapiens
  misc_feature (61)..(62): /note="This region represents a CpG dinucleotide"
  misc_feature (61)..(61): /note="Nucleotide may be methylated to form 5-methylcytosine"
caagcctccacatcgttcctgccaccacaactaatcccagttcccagatctgggggtctgcgtgttcagcttctgtcactgagtctgagagagaaaaaatcatgagaacagggaccgcatag

SEQ ID NO: 26851 - DNA, 122 bp, Homo sapiens
  misc_feature (61)..(62): /note="This region represents a CpG dinucleotide"
  misc_feature (61)..(61): /note="Nucleotide may be methylated to form 5-methylcytosine"
acccacccagagggatggctggagagagggaacgctggccaagggaccagctcaggcaggcgctggcagtgtagagttgccaaatgttgtacggcacatacactaaaaagttgtttgtgggc

SEQ ID NO: 26852 - DNA, 122 bp, Homo sapiens
  misc_feature (61)..(62): /note="This region represents a CpG dinucleotide"
  misc_feature (61)..(61): /note="Nucleotide may be methylated to form 5-methylcytosine"
cgcattaagaaaagctggagccgaggtgtggtgtagtgctggccatgatgcaaagctcagcgtgctgccccaaatgagtccctctgagcagcaggcattgtggagagactcaagctctaatt

SEQ ID NO: 26853 - DNA, 122 bp, Homo sapiens
  misc_feature (61)..(62): /note="This region represents a CpG dinucleotide"
  misc_feature (61)..(61): /note="Nucleotide may be methylated to form 5-methylcytosine"
aacagcagaatgactcattgagccattgagccattcagcacattctctatatggcagattcggtgctgtctctggaaatacataaacatagagcgattcctttttctgttgaggcaaaatat

SEQ ID NO: 26854 - DNA, 122 bp, Homo sapiens
  misc_feature (61)..(62): /note="This region represents a CpG dinucleotide"
  misc_feature (61)..(61): /note="Nucleotide may be methylated to form 5-methylcytosine"
tcttcatattgagaggtgaagtttattttccttccccttgaatctgggctggcccaatgacgttttgttttgttttgtttttgattaataaaatgcagcagaagtcacactatatgacaccc

SEQ ID NO: 26855 - DNA, 122 bp, Homo sapiens
  misc_feature (61)..(62): /note="This region represents a CpG dinucleotide"
  misc_feature (61)..(61): /note="Nucleotide may be methylated to form 5-methylcytosine"
agccattgactcatgtacaggacacattaagcctcatctctgctaacagatttacttacccgatgataacaactttctgcagcagtcagagtgagcatttagggcagctaaatgtaaaggga

SEQ ID NO: 26856 - DNA, 122 bp, Homo sapiens
  misc_feature (61)..(62): /note="This region represents a CpG dinucleotide"
  misc_feature (61)..(61): /note="Nucleotide may be methylated to form 5-methylcytosine"
tggtgtgcattttaattttaacacaccagaagatatgctatgtgaacctagtaagcttaccgcaactgcaatgttccaaagttaagagacaataatttcaacaaaaacaaggaaaaggaggt

SEQ ID NO: 26857 - DNA, 122 bp, Homo sapiens
  misc_feature (61)..(62): /note="This region represents a CpG dinucleotide"
  misc_feature (61)..(61): /note="Nucleotide may be methylated to form 5-methylcytosine"
tggaggaacaggatcccatataagccaaactatggaaacctacatgcctcttgggaagaacgcacagggctaaccaacatgtccgatatcctggagtatgtgcctcacagtacagacacacc

SEQ ID NO: 26858 - DNA, 122 bp, Homo sapiens
  misc_feature (61)..(62): /note="This region represents a CpG dinucleotide"
  misc_feature (61)..(61): /note="Nucleotide may be methylated to form 5-methylcytosine"
agccagccgtgactctgcccctccctctgaagaagagaactttatagaagggaaatcaggcgacaaagtcaaggaaagaggtgatagatttagaagaccttgaagggaaaatgaatccattg

SEQ ID NO: 26859 - DNA, 122 bp, Homo sapiens
  misc_feature (61)..(62): /note="This region represents a CpG dinucleotide"
  misc_feature (61)..(61): /note="Nucleotide may be methylated to form 5-methylcytosine"
gaaacttggtttggctgcgtgacattgccaaaatcatccagttaatcttgtagtgactcacgttatgggctgaaattcatgcttggtacttatccacatggacatttcagggacatggtgaa

SEQ ID NO: 26860 - DNA, 122 bp, Homo sapiens
  misc_feature (61)..(62): /note="This region represents a CpG dinucleotide"
  misc_feature (61)..(61): /note="Nucleotide may be methylated to form 5-methylcytosine"
cattactgcagtcacgctgggatctcgaatagtttcccattaggtgaacgcactctaaaacgtcgcccgaagtttggtgtcatactgaagctctcgggagctacctggaagatttcagagga

SEQ ID NO: 26861 - DNA, 122 bp, Homo sapiens
  misc_feature (61)..(62): /note="This region represents a CpG dinucleotide"
  misc_feature (61)..(61): /note="Nucleotide may be methylated to form 5-methylcytosine"
tactttttttcactttctgctatcagtaaattctttttgaaactgcaaagccgcttgtttcggaaacaaattgaggaaaaatctggacagttcttcctcggcacaagagagggagagagatc

SEQ ID NO: 26862 - DNA, 122 bp, Homo sapiens
  misc_feature (61)..(62): /note="This region represents a CpG dinucleotide"
  misc_feature (61)..(61): /note="Nucleotide may be methylated to form 5-methylcytosine"
cccactgggaattttacaaacatcctaaaaagcaatgaaggaaaaagtcgatttgaagggcgggacttaagtcagttgtgtttttcttacgacgcccacactgcaatgactcagaccactaa

SEQ ID NO: 26863 - DNA, 122 bp, Homo sapiens
  misc_feature (61)..(62): /note="This region represents a CpG dinucleotide"
  misc_feature (61)..(61): /note="Nucleotide may be methylated to form 5-methylcytosine"
cctgctgcgcaccaagtccgcttgctgaggagaagggtgtctcacctggcacaagggccccgctccagagtggccgcacccagagcagcttctgtgacacccagaaccccagggtacgtgag

SEQ ID NO: 26864 - DNA, 122 bp, Homo sapiens
  misc_feature (61)..(62): /note="This region represents a CpG dinucleotide"
  misc_feature (61)..(61): /note="Nucleotide may be methylated to form 5-methylcytosine"
ccatgggcgtgtgcatgtgtgtgtgcccactgtgagcaggcatggtgggcccttcgttcccgcacgggctcacaatgcctcctaccaggagcccctccacagtggggaagctcccagctgca

SEQ ID NO: 26865 - DNA, 122 bp, Homo sapiens
  misc_feature (61)..(62): /note="This region represents a CpG dinucleotide"
  misc_feature (61)..(61): /note="Nucleotide may be methylated to form 5-methylcytosine"
tagggtttacacagtggacaaatgaatatctaacttcagagtcaccagtgtgctaggttgcgtgctagtcaacccagtaattccttccagatccagcttccctttttcatttcctcagatac

SEQ ID NO: 26866 - DNA, 122 bp, Homo sapiens
  misc_feature (61)..(62): /note="This region represents a CpG dinucleotide"
  misc_feature (61)..(61): /note="Nucleotide may be methylated to form 5-methylcytosine"
tcaattttgtggttgaggaggttgtgctggtctccagtgacatcagtgtcattgtggatacgtcagcatcctctggcttaggaacaaagcaagtattcctgaggtatggcaggggtagcagg

SEQ ID NO: 26867 - DNA, 122 bp, Homo sapiens
  misc_feature (61)..(62): /note="This region represents a CpG dinucleotide"
  misc_feature (61)..(61): /note="Nucleotide may be methylated to form 5-methylcytosine"
tcacagaatgatgtcattaagtgtgcagcctgtgaaatgctaaggacagcctgtttccaccgtgacatgggtcactcaggaatgcgagggaagtacaccactgaatgtcataaagctttaaa

SEQ ID NO: 26868 - DNA, 122 bp, Homo sapiens
  misc_feature (61)..(62): /note="This region represents a CpG dinucleotide"
  misc_feature (61)..(61): /note="Nucleotide may be methylated to form 5-methylcytosine"
ctattaataatgttaaagggggttacagccgtgactcactccaggaagtcaaccatcattcgcttcctcaatctcaccaaccagtccccatgtacaaaatcagcgacttctgcaaatgagtt

SEQ ID NO: 26869 - DNA, 122 bp, Homo sapiens
  misc_feature (61)..(62): /note="This region represents a CpG dinucleotide"
  misc_feature (61)..(61): /note="Nucleotide may be methylated to form 5-methylcytosine"
tagagtccttctcttcatttagaggataattcataacagaaggtgactgtgactatgggacgaatacaccttagatttgaatacttctgcaatgttaaatttacccaggctctatagtaggg

SEQ ID NO: 26870 - DNA, 122 bp, Homo sapiens
  misc_feature (61)..(62): /note="This region represents a CpG dinucleotide"
  misc_feature (61)..(61): /note="Nucleotide may be methylated to form 5-methylcytosine"
tagatgaccacgttttcactgttgaaagcaccaagcccaaataacacctcctggtaatcacgtcaggaaatgcaaatgcatgccatgtgaaaggaatggtcacatttcacttttttatataa

SEQ ID NO: 26871 - DNA, 122 bp, Homo sapiens
  misc_feature (61)..(62): /note="This region represents a CpG dinucleotide"
  misc_feature (61)..(61): /note="Nucleotide may be methylated to form 5-methylcytosine"
attttaaaggttttttcaaatgtttctttaacatggtttttggtatgaacaatttgtgtacgttttaaaattataagacatttaggctggtgttaggcaagtctcagcagctccagctttgg

SEQ ID NO: 26872 - DNA, 122 bp, Homo sapiens
  misc_feature (61)..(62): /note="This region represents a CpG dinucleotide"
  misc_feature (61)..(61): /note="Nucleotide may be methylated to form 5-methylcytosine"
tcttctttcagagtcactgaaacctgtgactcaaactctctgacataccagaggagggtgcgaggtgctaaaacaggtcacaaggcttgaagtagctgatgcaaactgactcagggaagaga

SEQ ID NO: 26873 - DNA, 122 bp, Homo sapiens
  misc_feature (61)..(62): /note="This region represents a CpG dinucleotide"
  misc_feature (61)..(61): /note="Nucleotide may be methylated to form 5-methylcytosine"
cctggcttccagtgctggtcttgctagctgccctgccaggtggacggcttcattagtaagcgtgaaaaattgggagtgccaccatcaggccaggctaaagcaatttggatggctgggaaaag

SEQ ID NO: 26874 - DNA, 122 bp, Homo sapiens
  misc_feature (61)..(62): /note="This region represents a CpG dinucleotide"
  misc_feature (61)..(61): /note="Nucleotide may be methylated to form 5-methylcytosine"
gcgaaactgtcaaaaagaaaagaaaaaagaaaaaaggatgattaatttctgttatcttctcgaaggacaatactgtcatgtggcacatgtttgaacagttggggctaatgcacagaaaaatt

SEQ ID NO: 26875 - DNA, 122 bp, Homo sapiens
  misc_feature (61)..(62): /note="This region represents a CpG dinucleotide"
  misc_feature (61)..(61): /note="Nucleotide may be methylated to form 5-methylcytosine"
atggttgtaccataccctgtacccacagtgagaattccagttccaccacatcctcagcaacgctggttataatcagtcatttcaagtttagccgttctgtttacccgatgacaaatcaggct

SEQ ID NO: 26876 - DNA, 122 bp, Homo sapiens
  misc_feature (61)..(62): /note="This region represents a CpG dinucleotide"
  misc_feature (61)..(61): /note="Nucleotide may be methylated to form 5-methylcytosine"
gacagggatgaaggaaaatactttaatagttcaaaaaataataatgctgaaagctctctacgaaagactgaatgtaaaagtaaaaagtgtacatagttgtaaaaaaaaggagtttttaaaca

SEQ ID NO: 26877 - DNA, 122 bp, Homo sapiens
  misc_feature (61)..(62): /note="This region represents a CpG dinucleotide"
  misc_feature (61)..(61): /note="Nucleotide may be methylated to form 5-methylcytosine"
gccaactgtgagtttcagtatgaggtgatctggccaactgactggttggagaacccctgacgttcacatcgtaaggtcttttctcacttaccaaattccccagagaagagtcttccagtctc

SEQ ID NO: 26878 - DNA, 122 bp, Homo sapiens
  misc_feature (61)..(62): /note="This region represents a CpG dinucleotide"
  misc_feature (61)..(61): /note="Nucleotide may be methylated to form 5-methylcytosine"
tgccctaggcaagtgtgccattttaatcctttataccatatctttgctgcaccttttctacgtttagatatgtgtcacatgttacagttgcctggggtattcagtgcagcgtcatgctgtgt

SEQ ID NO: 26879 - DNA, 122 bp, Homo sapiens
  misc_feature (61)..(62): /note="This region represents a CpG dinucleotide"
  misc_feature (61)..(61): /note="Nucleotide may be methylated to form 5-methylcytosine"
gagttctctgcaggaataaataagcctcagcattcatgaaaatccactactccagacagacggctttggaatccaccagctacatccagctccctgaggcaggtaatccatgatgttttaca

SEQ ID NO: 26880 - DNA, 122 bp, Homo sapiens
  misc_feature (61)..(62): /note="This region represents a CpG dinucleotide"
  misc_feature (61)..(61): /note="Nucleotide may be methylated to form 5-methylcytosine"
cactgtggccttgtgacttggtcggcatttcgtagtctgctgaaggtgggtgctgggttccgctttggtggggagacctgttgcctacagcacccacccccgcccgacgcccccgcatgtcc

SEQ ID NO: 26881 - DNA, 122 bp, Homo sapiens
  misc_feature (61)..(62): /note="This region represents a CpG dinucleotide"
  misc_feature (61)..(61): /note="Nucleotide may be methylated to form 5-methylcytosine"
tgaaacatcacctcttcctgggcctcaagtacacttcaggccttcagactggaactgcatcgttggctctcctgatctttgggcccttggacttggactggttccacaccattggctctcct

SEQ ID NO: 26882 - DNA, 122 bp, Homo sapiens
  misc_feature (61)..(62): /note="This region represents a CpG dinucleotide"
  misc_feature (61)..(61): /note="Nucleotide may be methylated to form 5-methylcytosine"
tgttaatttcatcaacatgttcatttctttcagctccatgttcatgcatgtcttttaacccggaaacaagaagactgtccataggtctagacaatggtacaatctcagtaagtacacataaa

SEQ ID NO: 26883 - DNA, 122 bp, Homo sapiens
  misc_feature (61)..(62): /note="This region represents a CpG dinucleotide"
  misc_feature (61)..(61): /note="Nucleotide may be methylated to form 5-methylcytosine"
ttaataacagtgctatctttggaagtgaaataataatcatttgctgtttctgaaacaggacgttccatgacacagtatgagactgagtgttcgtctgtgtaccagtgatgtatgcaatttat

SEQ ID NO: 26884 - DNA, 122 bp, Homo sapiens
  misc_feature (61)..(62): /note="This region represents a CpG dinucleotide"
  misc_feature (61)..(61): /note="Nucleotide may be methylated to form 5-methylcytosine"
actgtaggagccttagagtatgccattggctttcatatacattgtcttattgaatctcaacgtcaactctgctcaaatggtgttactatctgaggcccagagagggtaagtgatttgactga

SEQ ID NO: 26885 - DNA, 122 bp, Homo sapiens
  misc_feature (61)..(62): /note="This region represents a CpG dinucleotide"
  misc_feature (61)..(61): /note="Nucleotide may be methylated to form 5-methylcytosine"
aaacccctgctgccaagaggccagctgcaagggacagaagcagccaaccccccaaaaagacgtctttgaaagagaataaagtgaagatccctaaaaagtccgctgggaagagctgccctccc

SEQ ID NO: 26886 - DNA, 122 bp, Homo sapiens
  misc_feature (61)..(62): /note="This region represents a CpG dinucleotide"
  misc_feature (61)..(61): /note="Nucleotide may be methylated to form 5-methylcytosine"
taatccagactttacttgcaaaatccgttaaagcattaagagttctcccttcgccaggtgcggtggctcatgcctgtaatcccagcaatttgggaggccgagacgggctgatcacttgaggt

SEQ ID NO: 26887 - DNA, 122 bp, Homo sapiens
  misc_feature (61)..(62): /note="This region represents a CpG dinucleotide"
  misc_feature (61)..(61): /note="Nucleotide may be methylated to form 5-methylcytosine"
tcttgcaactgctgccagtcttcagaaagattacatcagactggaaaaacctaggagagacgctgtaatgtcttagccgtggtgacctactggggcatcttataacccacttcaacgaggca

SEQ ID NO: 26888 - DNA, 122 bp, Homo sapiens
  misc_feature (61)..(62): /note="This region represents a CpG dinucleotide"
  misc_feature (61)..(61): /note="Nucleotide may be methylated to form 5-methylcytosine"
tggagtcgctctggttcaaacacctctgacagtcttagttgtctgcaggcagagactggccgtatgcaccttatatacccctcagtctgactcaaagtgcatgggtgtgtgctctcttgggt

SEQ ID NO: 26889 - DNA, 122 bp, Homo sapiens
  misc_feature (61)..(62): /note="This region represents a CpG dinucleotide"
  misc_feature (61)..(61): /note="Nucleotide may be methylated to form 5-methylcytosine"
gctatggggaaagaaactggagacaaaggtgtcaaccccagcagggcctggggagggaagcggccctgtacatcctcactctggtgggacctcagtcccctggccacagtgtgctccgggct

SEQ ID NO: 26890 - DNA, 122 bp, Homo sapiens
  misc_feature (61)..(62): /note="This region represents a CpG dinucleotide"
  misc_feature (61)..(61): /note="Nucleotide may be methylated to form 5-methylcytosine"
tgcaggcaggaggcttcgtgcctcggtgtccctgtcgcgagggctgcagggggttggtggcgaggccagggcgcaactgcaagcccccggattcgcggccagactgcgcattccaaccgcgg

SEQ ID NO: 26891 - DNA, 122 bp, Homo sapiens
  misc_feature (61)..(62): /note="This region represents a CpG dinucleotide"
  misc_feature (61)..(61): /note="Nucleotide may be methylated to form 5-methylcytosine"
aggcagttgcagtctgattgtgacatctgccgagagctgagtctggacaggttcctctgccgctcttggccaggggtgtagcccccgtgccaccttagtgattccttcaggccatcatttgt

SEQ ID NO: 26892 - DNA, 122 bp, Homo sapiens
  misc_feature (61)..(62): /note="This region represents a CpG dinucleotide"
  misc_feature (61)..(61): /note="Nucleotide may be methylated to form 5-methylcytosine"
aagcccttagaaaccaagaacaagttctcccaggtgaagctgttggcaggagctgtgaagcgtaagagctcagagagtgacaacagtgtgaaaagactgaaaccggaccctgagccagatga

SEQ ID NO: 26893 - DNA, 122 bp, Homo sapiens
  misc_feature (61)..(62): /note="This region represents a CpG dinucleotide"
  misc_feature (61)..(61): /note="Nucleotide may be methylated to form 5-methylcytosine"
gctgcggtgagctgtgatagcaccattgcacaatctaaactgggccacagagcaagacctcgtctccaaaggaaaaaaaaaaaaaagaccaccatgattgttctagtattgtttattgttgt

SEQ ID NO: 26894 - DNA, 122 bp, Homo sapiens
  misc_feature (61)..(62): /note="This region represents a CpG dinucleotide"
  misc_feature (61)..(61): /note="Nucleotide may be methylated to form 5-methylcytosine"
agttatgtttctcacttccaattaatatatctgctttaagcatcagttccttttgccagccggcttcttacatattcatgtgtttgtctcatcaatggagtggtggagtttctgcataggag

SEQ ID NO: 26895 - DNA, 122 bp, Homo sapiens
  misc_feature (61)..(62): /note="This region represents a CpG dinucleotide"
  misc_feature (61)..(61): /note="Nucleotide may be methylated to form 5-methylcytosine"
gattaagcactacattttccttacaatcactctgaacaattccctttcagttcaccatggcgttatgagcttgatatatttgctatgttggttcagaagaatgcagaattgtgttaaaaacc

SEQ ID NO: 26896 - DNA, 122 bp, Homo sapiens
  misc_feature (61)..(62): /note="This region represents a CpG dinucleotide"
  misc_feature (61)..(61): /note="Nucleotide may be methylated to form 5-methylcytosine"
tgctgatttgggaggtcagaatcttgttctgggctttattagcatttcgctcaagtcaagcgaatcaccttgtcaagtcatatgcagagaaggcagaacatgacgttggaggaaagaaaaca

SEQ ID NO: 26897 - DNA, 122 bp, Homo sapiens
  misc_feature (61)..(62): /note="This region represents a CpG dinucleotide"
  misc_feature (61)..(61): /note="Nucleotide may be methylated to form 5-methylcytosine"
ataagaatcacagctggccatcttctgctggcacctgtagatctaaagcattctttgtgacggttccatggtattccactgtgcagatgtcctgtgactgattcagcccatcccctgttgat

SEQ ID NO: 26898 - DNA, 122 bp, Homo sapiens
  misc_feature (61)..(62): /note="This region represents a CpG dinucleotide"
  misc_feature (61)..(61): /note="Nucleotide may be methylated to form 5-methylcytosine"
ttgaggcccagagggaagtggctgcccaggggttgtcttgtgagtcactgacagcaccaacgcatttcacctcaagaagcgcatgggattataagagcctggagattgaaaaatccctatag

SEQ ID NO: 26899 - DNA, 122 bp, Homo sapiens
  misc_feature (61)..(62): /note="This region represents a CpG dinucleotide"
  misc_feature (61)..(61): /note="Nucleotide may be methylated to form 5-methylcytosine"
caggtaccacagtatgacgcgacagctgctccgcaaggctgacggggtggtgctcatgtacgacatcacctcccaggagagctttgcccacgtgcgctactggctagactgtctccaggtga

SEQ ID NO: 26900 - DNA, 122 bp, Homo sapiens
  misc_feature (61)..(62): /note="This region represents a CpG dinucleotide"
  misc_feature (61)..(61): /note="Nucleotide may be methylated to form 5-methylcytosine"
ttaaaactgcagatgaagggctgactctgggcatgccattggttgggctcgttccttccccgcgaccattctcctcctgagagctctgaagtcattacatcgaagtaagtaatttagacaca

SEQ ID NO: 26901 - DNA, 122 bp, Homo sapiens
  misc_feature (61)..(62): /note="This region represents a CpG dinucleotide"
  misc_feature (61)..(61): /note="Nucleotide may be methylated to form 5-methylcytosine"
acagccacaaggactcccatgcccaaccacactagctagcccctctcaggagacttctcacgcttttaggagacagaggcccagggactagaatgactaacttatttttggattgtacttca

SEQ ID NO: 26902 - DNA, 122 bp, Homo sapiens
  misc_feature (61)..(62): /note="This region represents a CpG dinucleotide"
  misc_feature (61)..(61): /note="Nucleotide may be methylated to form 5-methylcytosine"
tccaggcttttcttatgcttctctgggtctgttctgtgcactcacagctctggatgagctcgagagttggctagattcatacacataattagggggtgcccttctccaatgcacttctctct

SEQ ID NO: 26903 - DNA, 122 bp, Homo sapiens
  misc_feature (61)..(62): /note="This region represents a CpG dinucleotide"
  misc_feature (61)..(61): /note="Nucleotide may be methylated to form 5-methylcytosine"
tgctctgccctggtacctgggaccagggccatgcaccattgctttagagaacacctgctccgacccaggtcctgcaccagggatttcccaccagctgaatcagacacagttgctgtcctcag

SEQ ID NO: 26904 - DNA, 122 bp, Homo sapiens
  misc_feature (61)..(62): /note="This region represents a CpG dinucleotide"
  misc_feature (61)..(61): /note="Nucleotide may be methylated to form 5-methylcytosine"
cctcctgctctgtggctgttttcttagactttccttgcattagaggactgtcttagcttgcgaggctgtaacaaagtaccacaggctagtgactcacgaacaacacaagccacagtcctgga

SEQ ID NO: 26905 - DNA, 122 bp, Homo sapiens
  misc_feature (61)..(62): /note="This region represents a CpG dinucleotide"
  misc_feature (61)..(61): /note="Nucleotide may be methylated to form 5-methylcytosine"
gctggctggagctggagcagtgtcctcagccactggccgggaaggctttgttagactaagcgtggcctgaggatgcctcagtgccaagtcacaccatgacctggacctgccttagtccgtga

SEQ ID NO: 26906 - DNA, 122 bp, Homo sapiens
  misc_feature (61)..(62): /note="This region represents a CpG dinucleotide"
  misc_feature (61)..(61): /note="Nucleotide may be methylated to form 5-methylcytosine"
ttccctactcagcctgtcaacccttcccggacctacccagcaggagcctcctctcccaaacgggcctgaggcccaaaccctgcagctcagtctcggcctccagtgcacagacaagggcaagt

SEQ ID NO: 26907 - DNA, 122 bp, Homo sapiens
  misc_feature (61)..(62): /note="This region represents a CpG dinucleotide"
  misc_feature (61)..(61): /note="Nucleotide may be methylated to form 5-methylcytosine"
gtggctttgcagtgagccagcagggctcaaaatatctttattgctgtattagtttgttttcgcactgctgtaaagaagtacctgtggccaggcatggtgactcatggctgtaatcccagcac

SEQ ID NO: 26908 - DNA, 122 bp, Homo sapiens
  misc_feature (61)..(62): /note="This region represents a CpG dinucleotide"
  misc_feature (61)..(61): /note="Nucleotide may be methylated to form 5-methylcytosine"
agattactactatgacaccttcaaaggagatgactacaatgaggagaatcctactgaacccggcagcgacggcaccatgtcagacaaggaaattactcatgatgtcaaaggtaaccccatgt

SEQ ID NO: 26909 - DNA, 122 bp, Homo sapiens
  misc_feature (61)..(62): /note="This region represents a CpG dinucleotide"
  misc_feature (61)..(61): /note="Nucleotide may be methylated to form 5-methylcytosine"
cctaccaccacaagataaactccagaagggcgagaaccatgtgttttctttgccactatacgtgtagcatccatttcaatacctcaggtgagctgggtagagtgacacgtacatgtagttcc

SEQ ID NO: 26910 - DNA, 122 bp, Homo sapiens
  misc_feature (61)..(62): /note="This region represents a CpG dinucleotide"
  misc_feature (61)..(61): /note="Nucleotide may be methylated to form 5-methylcytosine"
ggaagtccttgaaaagtggaggctggggctttgttcggcctttccctgcccctaggcttgcgttcagcccgtggctgtgtgtcccttcctggctttgcccctgatttgctcagtgtgggtga

SEQ ID NO: 26911 - DNA, 122 bp, Homo sapiens
  misc_feature (61)..(62): /note="This region represents a CpG dinucleotide"
  misc_feature (61)..(61): /note="Nucleotide may be methylated to form 5-methylcytosine"
ttgtaaaggtgagcagcagcgagtcatgaactgcaagctcttggtaggttttggacgggacgtggctggctgagcttcctcttggctgtgtggagcctcagcagggcgttgtgtttgacggc

SEQ ID NO: 26912 - DNA, 122 bp, Homo sapiens
  misc_feature (61)..(62): /note="This region represents a CpG dinucleotide"
  misc_feature (61)..(61): /note="Nucleotide may be methylated to form 5-methylcytosine"
atggaggtttttagtggcaaaacataggtacgggcaagaaaaaggctggctgtagatgaacgcctctgaaaaggctatgaaggaagttatccactttaaatacgtgagtgtaaaaaaaatca

SEQ ID NO: 26913 - DNA, 122 bp, Homo sapiens
  misc_feature (61)..(62): /note="This region represents a CpG dinucleotide"
  misc_feature (61)..(61): /note="Nucleotide may be methylated to form 5-methylcytosine"
tatacagtttaacctaggagtcaagctcctgctatatttggaatggtctcagttttgagacgtggtaccttggatcccaggtatatccaaagtcttgagagtgtccattgaggactttggtc

SEQ ID NO: 26914 - DNA, 122 bp, Homo sapiens
  misc_feature (61)..(62): /note="This region represents a CpG dinucleotide"
  misc_feature (61)..(61): /note="Nucleotide may be methylated to form 5-methylcytosine"
ggcggcccctcccgggctgggtcccgccccgccctgccctgtccttgaatccaaggcgggcgcagtgcgatcgcgctgcccaggcccgcacccgaccattcctccgtctctctggccgcctc

SEQ ID NO: 26915 - DNA, 122 bp, Homo sapiens
  misc_feature (61)..(62): /note="This region represents a CpG dinucleotide"
  misc_feature (61)..(61): /note="Nucleotide may be methylated to form 5-methylcytosine"
gagaaaaagagaagagagaggggaggagagccctgtcaccagcagtcagaggctgcactgcgagactttgctgccctcaacagccttccagtgtaagcgctgccacccaatttgctacagag

SEQ ID NO: 26916 - DNA, 122 bp, Homo sapiens
  misc_feature (61)..(62): /note="This region represents a CpG dinucleotide"
  misc_feature (61)..(61): /note="Nucleotide may be methylated to form 5-methylcytosine"
gctaatcgtcctgctgtgttaggaacccatgagacaatgctgtaacatttagctttctgacgtccaaagcatctagatcagtccccaattaaacaggtattaatcacaaagactctaaaagc

SEQ ID NO: 26917 - DNA, 122 bp, Homo sapiens
  misc_feature (61)..(62): /note="This region represents a CpG dinucleotide"
  misc_feature (61)..(61): /note="Nucleotide may be methylated to form 5-methylcytosine"
ttaatttttaacctttctctcatattttagtaaatgctcttatggcatatgccacaaagacgtggatgccatgtttctgaagaatattttatagctatgctagtgaggaaatctattccaga

SEQ ID NO: 26918 - DNA, 122 bp, Homo sapiens
  misc_feature (61)..(62): /note="This region represents a CpG dinucleotide"
  misc_feature (61)..(61): /note="Nucleotide may be methylated to form 5-methylcytosine"
cccaaagtgttgggatacaggcgtgagccaccacgcccggccatctttcacatttagatgcgtaattcacctggaatttaatttcatgcgtggtgtgagggaagagtgatttcatttctatt

SEQ ID NO: 26919 - DNA, 122 bp, Homo sapiens
  misc_feature (61)..(62): /note="This region represents a CpG dinucleotide"
  misc_feature (61)..(61): /note="Nucleotide may be methylated to form 5-methylcytosine"
actaactgtttgaggaagtggtgtgggtaattataactcagtctcattgacaacatgaagcgaggcctccgttttaaagggctcacttggcatttcatatggctgcctgctgcccctctgtt

SEQ ID NO: 26920 - DNA, 122 bp, Homo sapiens
  misc_feature (61)..(62): /note="This region represents a CpG dinucleotide"
  misc_feature (61)..(61): /note="Nucleotide may be methylated to form 5-methylcytosine"
tagcttcttcgggtcgtcatggagacgcccttgcacaccaacagtccttcactccttctccgggtcacgcccccgtgcttttccacgcccaccccaggtcttgcccctctgcgctcctctcc

SEQ ID NO: 26921 - DNA, 122 bp, Homo sapiens
  misc_feature (61)..(62): /note="This region represents a CpG dinucleotide"
  misc_feature (61)..(61): /note="Nucleotide may be methylated to form 5-methylcytosine"
caagtaaagctgttcaactgcctaaggtgattcatttgatcactcatcccctgttagtcacgcagctgatgggaattttaaacacaactttcatctttggcctttgccttcatgatttcagc

SEQ ID NO: 26922 - DNA, 122 bp, Homo sapiens
  misc_feature (61)..(62): /note="This region represents a CpG dinucleotide"
  misc_feature (61)..(61): /note="Nucleotide may be methylated to form 5-methylcytosine"
ccacaagtttttcattccgttcaggaaactactctgagtctagtccatctaaagccatatcgttctagatcctctctcagaaacagaaaccaaatgcttccttattttaaacagcagatgtc

SEQ ID NO: 26923 - DNA, 122 bp, Homo sapiens
  misc_feature (61)..(62): /note="This region represents a CpG dinucleotide"
  misc_feature (61)..(61): /note="Nucleotide may be methylated to form 5-methylcytosine"
aactgatttttgtgtgttgatcttgtatccttcaactttcctgaattcacttattagctccgtgtgtgtgtgcactcttcaagatttttatataaggatcatgtcatctggaatagaaacag

SEQ ID NO: 26924 - DNA, 122 bp, Homo sapiens
  misc_feature (61)..(62): /note="This region represents a CpG dinucleotide"
  misc_feature (61)..(61): /note="Nucleotide may be methylated to form 5-methylcytosine"
cttttttaagacttcagctttgactgtccttacaagtggaaaacaacagctaattgagaacgctgttttcggtaagggggacactaaatggatctacaggagtagtggcacaactaaattta

SEQ ID NO: 26925 - DNA, 122 bp, Homo sapiens
  misc_feature (61)..(62): /note="This region represents a CpG dinucleotide"
  misc_feature (61)..(61): /note="Nucleotide may be methylated to form 5-methylcytosine"
gctgggatacgatgcaagcctcattgctatcagcccagggctctgtccactataccacagcggtcagagaacacttcagagaggtaagagtttgaactggatccttcaggtgaatcaccatg

SEQ ID NO: 26926 - DNA, 122 bp, Homo sapiens
  misc_feature (61)..(62): /note="This region represents a CpG dinucleotide"
  misc_feature (61)..(61): /note="Nucleotide may be methylated to form 5-methylcytosine"
gatacagaaaactgtgtaactgcacatacacataccagtagcacgatgagctcagatggacggaatgcttatgtgagcagacagacagggagagatactgcaagcatgttcccctccttccc

SEQ ID NO: 26927 - DNA, 122 bp, Homo sapiens
  misc_feature (61)..(62): /note="This region represents a CpG dinucleotide"
  misc_feature (61)..(61): /note="Nucleotide may be methylated to form 5-methylcytosine"
acagctgggggccatcctccagcagctctcgcagcagctgggggactaagtccttcgttccggaagaggaagctgtgctgtagtcatagcttccaccacaatgtgtacacagactatattct

SEQ ID NO: 26928 - DNA, 122 bp, Homo sapiens
  misc_feature (61)..(62): /note="This region represents a CpG dinucleotide"
  misc_feature (61)..(61): /note="Nucleotide may be methylated to form 5-methylcytosine"
actacagtgtggtggtgaagagcgtggtttcagtcccaggcagacccagtcccagttcctcggctgccactcactggccacagaatgcaagcaagtgacttaatctctccggcctccagttt

SEQ ID NO: 26929 - DNA, 122 bp, Homo sapiens
  misc_feature (61)..(62): /note="This region represents a CpG dinucleotide"
  misc_feature (61)..(61): /note="Nucleotide may be methylated to form 5-methylcytosine"
atgtcggcgcctttgtccacgggtgtgcgccgacttgtgtcctggggcgggggatgggtccgtgagcggacgctgccgcgtgggggaaggggcgggtgcgagggcagcccagagcgtgctgg

SEQ ID NO: 26930 - DNA, 122 bp, Homo sapiens
  misc_feature (61)..(62): /note="This region represents a CpG dinucleotide"
  misc_feature (61)..(61): /note="Nucleotide may be methylated to form 5-methylcytosine"
ggctcaggtgcggttgagtcaggggtgacataacttgctgctagtgttggacctgggtgacgggcaccagggtcccctggactattctctttccttcagtttgaaattttccactataaaaa

SEQ ID NO: 26931 - DNA, 122 bp, Homo sapiens
  misc_feature (61)..(62): /note="This region represents a CpG dinucleotide"
  misc_feature (61)..(61): /note="Nucleotide may be methylated to form 5-methylcytosine"
ggctttagtaagattaccaaggaagggatctcataatgctgtagtaatagtttacatgtgcgacatgagctagtgtttgtacatgtgacagaccttgtttctggattttattaaggctggtt

SEQ ID NO: 26932 - DNA, 122 bp, Homo sapiens
  misc_feature (61)..(62): /note="This region represents a CpG dinucleotide"
  misc_feature (61)..(61): /note="Nucleotide may be methylated to form 5-methylcytosine"
tcccccctcccactttcccctccgcccacttcctttctgaccacatccttttctttttggcgcacaaggaggcatttttcctattgcagaaaagatcatttgcagtgtttttcaagagtcat

SEQ ID NO: 26933 - DNA, 122 bp, Homo sapiens
  misc_feature (61)..(62): /note="This region represents a CpG dinucleotide"
  misc_feature (61)..(61): /note="Nucleotide may be methylated to form 5-methylcytosine"
gaggaggagatgagtcctgggactactcttggggtcactcagtccatctcccagcctctccgtgagactctctggcaacctgaccctgcctttctgcccccacctcccactcagtaaggaca

SEQ ID NO: 26934 - DNA, 122 bp, Homo sapiens
  misc_feature (61)..(62): /note="This region represents a CpG dinucleotide"
  misc_feature (61)..(61): /note="Nucleotide may be methylated to form 5-methylcytosine"
ggcactagcaatcactaggcattgttccaagcacacggataaactgagaatcctcgtggtcgccccgggggtgggactgccattgtccagagagacctgcttttgcctgtggtgccacacgg

SEQ ID NO: 26935 - DNA, 122 bp, Homo sapiens
  misc_feature (61)..(62): /note="This region represents a CpG dinucleotide"
  misc_feature (61)..(61): /note="Nucleotide may be methylated to form 5-methylcytosine"
aaccaggctgtgcgctcttcatggcaggtgctggctattactgagaccagccatctggttcgttccttccacaaacaagtggaacaagtttgttgttgttgtttttgaggcagagtctcact

SEQ ID NO: 26936 - DNA, 122 bp, Homo sapiens
  misc_feature (61)..(62): /note="This region represents a CpG dinucleotide"
  misc_feature (61)..(61): /note="Nucleotide may be methylated to form 5-methylcytosine"
tggccccgaaggtccccggagggtggagcagtagcctgagctgctaacagcagcctctgacgagccctgacccatcagctttgcacccctgagcctgggagaacctggtacccgctgggcac

SEQ ID NO: 26937 - DNA, 122 bp, Homo sapiens
  misc_feature (61)..(62): /note="This region represents a CpG dinucleotide"
  misc_feature (61)..(61): /note="Nucleotide may be methylated to form 5-methylcytosine"
gaatgtcacctattgaagaggtgccaagcagtttgccccgctctggaattacgaagatcacgtgttccttgcatacatctggcagcagtgggaaaacctcagagttcctgtgggatgtctga

SEQ ID NO: 26938 - DNA, 122 bp, Homo sapiens
  misc_feature (61)..(62): /note="This region represents a CpG dinucleotide"
  misc_feature (61)..(61): /note="Nucleotide may be methylated to form 5-methylcytosine"
ccactgtgttaattttaacagtgtcaggccctgtgttaggccccaggggaaatagatgagcgtagactcagaaacatgacctttgcccttgaggagctctgggataactggggaagctgaca

SEQ ID NO: 26939 - DNA, 122 bp, Homo sapiens
  misc_feature (61)..(62): /note="This region represents a CpG dinucleotide"
  misc_feature (61)..(61): /note="Nucleotide may be methylated to form 5-methylcytosine"
tctctccagagtcccttccctgcacctccagggcctccccagatggaactggctgggagccgtgctttgttgaaacaaagggaaaacctgtctctcttgggtttgcagctgctgttgaaacc

SEQ ID NO: 26940 - DNA, 122 bp, Homo sapiens
  misc_feature (61)..(62): /note="This region represents a CpG dinucleotide"
  misc_feature (61)..(61): /note="Nucleotide may be methylated to form 5-methylcytosine"
gggtggtcctcatgaataatgttttgtttggggccaggaacatttttaaggatgtgaaagcgcttgcagcatgaggagaaaatgaaatcttgatactacagttttgtaagatattgaagcga

SEQ ID NO: 26941 - DNA, 122 bp, Homo sapiens
  misc_feature (61)..(62): /note="This region represents a CpG dinucleotide"
  misc_feature (61)..(61): /note="Nucleotide may be methylated to form 5-methylcytosine"
tgtagccaggcttcttttaccagggtcgtcatttcagttcctgggtaaacttcagctttacgtgagcccctgccctgctgtgaagcaatttggttcagactcgaccagatgttacagctcca

SEQ ID NO: 26942 - DNA, 122 bp, Homo sapiens
  misc_feature (61)..(62): /note="This region represents a CpG dinucleotide"
  misc_feature (61)..(61): /note="Nucleotide may be methylated to form 5-methylcytosine"
tcatcgtgggtcaggtggtagtacttggccgactggtccagcacagctgagtcctgaggccggaccgaagacagtgagcagggcagccctaggcctgcctgcctgcctgcccgcttgcccgc

SEQ ID NO: 26943 - DNA, 122 bp, Homo sapiens
  misc_feature (61)..(62): /note="This region represents a CpG dinucleotide"
  misc_feature (61)..(61): /note="Nucleotide may be methylated to form 5-methylcytosine"
ggcatcatttccactcacaggcatccaacagcaccttgtcacatggcacacctagacgcacggaagatgcacctagagctactttgcagcaggctggctgggccccattcccggctgcctta

SEQ ID NO: 26944 - DNA, 122 bp, Homo sapiens
  misc_feature (61)..(62): /note="This region represents a CpG dinucleotide"
  misc_feature (61)..(61): /note="Nucleotide may be methylated to form 5-methylcytosine"
gctcaagtcctttatataagatggtgcagtgtttacatataacatacatacacatcctcccgtatactttacattacctctagattacttataatccctaatacaatgtaagtgccatgtaa

SEQ ID NO: 26945 - DNA, 122 bp, Homo sapiens
  misc_feature (61)..(62): /note="This region represents a CpG dinucleotide"
  misc_feature (61)..(61): /note="Nucleotide may be methylated to form 5-methylcytosine"
agaattcactgttaatagctcaatgccttttctgcagatgctgtggttacagctcctcaccgcttccttagaagctcttttgccccttctgataataaatgacctgactcttgtcttttctt

SEQ ID NO: 26946 - DNA, 122 bp, Homo sapiens
  misc_feature (61)..(62): /note="This region represents a CpG dinucleotide"
  misc_feature (61)..(61): /note="Nucleotide may be methylated to form 5-methylcytosine"
ttctgagtcaccaacctgcagatgtcacaaggaggcctgtggtgccaccggaaggaagcacgctgacacacacatgcacagggtctgccctgtgacaaccaggcaaggactccttctgtctt

SEQ ID NO: 26947 - DNA, 122 bp, Homo sapiens
  misc_feature (61)..(62): /note="This region represents a CpG dinucleotide"
  misc_feature (61)..(61): /note="Nucleotide may be methylated to form 5-methylcytosine"
tcattctgccctggaccctgcaaattatgcagccaatcctgtgtgtgttttttcatgttgcgtagactctattacagtcagtaacatattgagaaagagtgtgtgtctcctctgatagtcta

SEQ ID NO: 26948 - DNA, 122 bp, Homo sapiens
  misc_feature (61)..(62): /note="This region represents a CpG dinucleotide"
  misc_feature (61)..(61): /note="Nucleotide may be methylated to form 5-methylcytosine"
cccggaccccaggaccactccccacagagccgaggcccaccggggggtgcgtgtggggtgcgtgtggggtgctgcccaagaaaaccccagaacgcaggaaacaaaccaccccaggtccacac

SEQ ID NO: 26949 - DNA, 122 bp, Homo sapiens
  misc_feature (61)..(62): /note="This region represents a CpG dinucleotide"
  misc_feature (61)..(61): /note="Nucleotide may be methylated to form 5-methylcytosine"
acaaaacaatacaatgactcaaatacaagagacatttatttcttggtcaaatagtgaaggcgggcatttaaaatctgtctgctaattccaacatctgagtcatcttgaagttaggtctttat

SEQ ID NO: 26950 - DNA, 122 bp, Homo sapiens
  misc_feature (61)..(62): /note="This region represents a CpG dinucleotide"
  misc_feature (61)..(61): /note="Nucleotide may be methylated to form 5-methylcytosine"
aagcccaggtgttctgacgctaaatcctgtatgtttttcccccatacacggcttctttgccgtatctacttcctgtagtcaaattactttaaccttggtcctcaaagtagacaaaactccag

SEQ ID NO: 26951 - DNA, 122 bp, Homo sapiens
  misc_feature (61)..(62): /note="This region represents a CpG dinucleotide"
  misc_feature (61)..(61): /note="Nucleotide may be methylated to form 5-methylcytosine"
gggggccgggcggggcgtgggaggcgatgagatgggagaagtccagacgcgtccctccaacgagggcctctgcatggctggggatgccccagaccccgaggcctctggcaacgacctcacgc

SEQ ID NO: 26952 - DNA, 122 bp, Homo sapiens
  misc_feature (61)..(62): /note="This region represents a CpG dinucleotide"
  misc_feature (61)..(61): /note="Nucleotide may be methylated to form 5-methylcytosine"
cattatagccactaaaagtctgcagaagtgacaatgctcttgcaggtgagggtagtgatgcgaggagtcattttcatgctagttaagaaatatctatcagggctgggcacggtggcttaagc

SEQ ID NO: 26953 - DNA, 122 bp, Homo sapiens
  misc_feature (61)..(62): /note="This region represents a CpG dinucleotide"
  misc_feature (61)..(61): /note="Nucleotide may be methylated to form 5-methylcytosine"
gggcttggaaatgctgcagcagggagcaggccccaggctggacctgccctgtcctcacgacgagtgtgtgcaaaagtgaacaataaatcatttcaaagatgcaaggaagaaaaaccaaaaca

SEQ ID NO: 26954 - DNA, 122 bp, Homo sapiens
  misc_feature (61)..(62): /note="This region represents a CpG dinucleotide"
  misc_feature (61)..(61): /note="Nucleotide may be methylated to form 5-methylcytosine"
tgtttgaggaagtttgcattctaagatatttcttcccaggctggtaccctagaatgtcatcgttccataggctgcctttgtcatcatttatgaaatttgtcaactcttggtccagaggtctg

SEQ ID NO: 26955 - DNA, 122 bp, Homo sapiens
  misc_feature (61)..(62): /note="This region represents a CpG dinucleotide"
  misc_feature (61)..(61): /note="Nucleotide may be methylated to form 5-methylcytosine"
gctaaatttaatgactcttattttatcagtaagaaaccaaggctaagcccttaaattggccggagctaaattgacatgccagcttcagagctgattccaaagcctggcatttttcgttacaa

SEQ ID NO: 26956 - DNA, 122 bp, Homo sapiens
  misc_feature (61)..(62): /note="This region represents a CpG dinucleotide"
  misc_feature (61)..(61): /note="Nucleotide may be methylated to form 5-methylcytosine"
cttctgagctagtgcaaaacaagtgtccatagtaatcctgtggcagcccaatgctgccttcgtcgctacctctccacccctcaaatcaccatccattggcagtagcctctgccacccaggtt

SEQ ID NO: 26957 - DNA, 122 bp, Homo sapiens
  misc_feature (61)..(62): /note="This region represents a CpG dinucleotide"
  misc_feature (61)..(61): /note="Nucleotide may be methylated to form 5-methylcytosine"
ttgtagctagtcctggagcagaattgtcacaatccaacctgttcatcagttgaaagcactcgtcattattagctctccaatcgcccttgtttttcatccatgggaacttttaattcagccac

SEQ ID NO: 26958 - DNA, 122 bp, Homo sapiens
  misc_feature (61)..(62): /note="This region represents a CpG dinucleotide"
  misc_feature (61)..(61): /note="Nucleotide may be methylated to form 5-methylcytosine"
ccctgggggagctgaaacagaacctgtccaggagctggcatgacgtgcaggtctctagcgcgtaggtacctgccccaggcgcacccctgggggctgaagagaacgggcaccacacgtgcccc

SEQ ID NO: 26959 - DNA, 122 bp, Homo sapiens
  misc_feature (61)..(62): /note="This region represents a CpG dinucleotide"
  misc_feature (61)..(61): /note="Nucleotide may be methylated to form 5-methylcytosine"
aactgactgacagcaaaggtcatcccacaggaacactggatgtgtaaacgtggagatctgcggagtggcagagcaggagagggcgctaaggggcatttgatccaacctccttctttcacttt

SEQ ID NO: 26960 - DNA, 122 bp, Homo sapiens
  misc_feature (61)..(62): /note="This region represents a CpG dinucleotide"
  misc_feature (61)..(61): /note="Nucleotide may be methylated to form 5-methylcytosine"
gctggagctctgcgatccacagctgaggacaccaggggctggcacccctccggcaagaaccggcaccacaccttctgagctttgacatcctggagcctgtagtggcactgcaccagaatgga

SEQ ID NO: 26961 - DNA, 122 bp, Homo sapiens
  misc_feature (61)..(62): /note="This region represents a CpG dinucleotide"
  misc_feature (61)..(61): /note="Nucleotide may be methylated to form 5-methylcytosine"
gagtggtggaatctgaggaaagagcccttccccctggtttttcagccttgcgaaaccccacgcctataaaaccaccagggcacttttcacagggaaggtaaagaaaaggacatattttcaac

SEQ ID NO: 26962 - DNA, 122 bp, Homo sapiens
  misc_feature (61)..(62): /note="This region represents a CpG dinucleotide"
  misc_feature (61)..(61): /note="Nucleotide may be methylated to form 5-methylcytosine"
cagtcttttctctcaccctgactctgaacttctccaggcctggtgttatgttttctgtagcgtgaccttataactaaccatcccatcgaagacgcttgggggagtgaaaggaggggctatta

SEQ ID NO: 26963 - DNA, 122 bp, Homo sapiens
  misc_feature (61)..(62): /note="This region represents a CpG dinucleotide"
  misc_feature (61)..(61): /note="Nucleotide may be methylated to form 5-methylcytosine"
agaagttaaagccactgagttagtctaaatgggtgttgatggcagtgactgctgctgatacggaagggaagtgctgggaagggaagagtgtggtccctttaaatgatacagaagaggggaaa

SEQ ID NO: 26964 - DNA, 122 bp, Homo sapiens
  misc_feature (61)..(62): /note="This region represents a CpG dinucleotide"
  misc_feature (61)..(61): /note="Nucleotide may be methylated to form 5-methylcytosine"
tgtttgctaaaccctcaatcctgcttttcagtcttggcaagattccccagcatctccagtcgtagttcctaactttgcctaactattaacactctccaatttgatttcactattactgatct

SEQ ID NO: 26965 - DNA, 122 bp, Homo sapiens
  misc_feature (61)..(62): /note="This region represents a CpG dinucleotide"
  misc_feature (61)..(61): /note="Nucleotide may be methylated to form 5-methylcytosine"
gatcgctacaatgaggattataaaacactgctcaaataaatcagagatgacacaaacaaacgggaaaacattccatgctcgtggacaggaggaatcaatgttattaaaatgaccaagtgccc

SEQ ID NO: 26966 - DNA, 122 bp, Homo sapiens
  misc_feature (61)..(62): /note="This region represents a CpG dinucleotide"
  misc_feature (61)..(61): /note="Nucleotide may be methylated to form 5-methylcytosine"
tgatcttgtgatccacccatctgggcctcccacagtgctgggattacaggcatgagccaccgggcccggcctaaagaaacctcttaaggatgggggagattataaaaaacattgatcagtta

SEQ ID NO: 26967 - DNA, 122 bp, Homo sapiens
  misc_feature (61)..(62): /note="This region represents a CpG dinucleotide"
  misc_feature (61)..(61): /note="Nucleotide may be methylated to form 5-methylcytosine"
tgggcaatgagagcatgtgggagctccacttacgggcagccttggctggtttctgttgagcgtcttcaccgttatctacgagtccagaaacatccagcagagggattgtgcatcgatattgc

SEQ ID NO: 26968 - DNA, 122 bp, Homo sapiens
  misc_feature (61)..(62): /note="This region represents a CpG dinucleotide"
  misc_feature (61)..(61): /note="Nucleotide may be methylated to form 5-methylcytosine"
gcatcagtgtaaaagagtttgaaactccttattgacaaaacacggcccactgtgtatcctcgagattagtctagcccatgaattcaatgttaagttcatgaaactcatatcccttgcaaatt

SEQ ID NO: 26969 - DNA, 122 bp, Homo sapiens
  misc_feature (61)..(62): /note="This region represents a CpG dinucleotide"
  misc_feature (61)..(61): /note="Nucleotide may be methylated to form 5-methylcytosine"
agttcaagaaaagaaagcaatttgagggtgctcgtgcctggttcttcctcagagggatgacggtgagaacaacggcaacagctacaggaaactgagccctcagaggccctgtgaggtagctg

SEQ ID NO: 26970 - DNA, 122 bp, Homo sapiens
  misc_feature (61)..(62): /note="This region represents a CpG dinucleotide"
  misc_feature (61)..(61): /note="Nucleotide may be methylated to form 5-methylcytosine"
tggtgggttttctctttaattgaataaaataatcctgaagtctttatagaagaataaatacgtactacctgagaggagccaagacaaatatggaaaagaaaaccggtgagggcagatttggc

SEQ ID NO: 26971 - DNA, 122 bp, Homo sapiens
  misc_feature (61)..(62): /note="This region represents a CpG dinucleotide"
  misc_feature (61)..(61): /note="Nucleotide may be methylated to form 5-methylcytosine"
tttaggatacactgtttcaagtatacagtgatttttataaaattaaaattccttacagaacgaaaggttttaaaatgtggcaaaggcatttttgttttgaaactgtgtgcatttatccagat

SEQ ID NO: 26972 - DNA, 122 bp, Homo sapiens
  misc_feature (61)..(62): /note="This region represents a CpG dinucleotide"
  misc_feature (61)..(61): /note="Nucleotide may be methylated to form 5-methylcytosine"
agtgatagccattgttgctaaatccttccatacaaaatgctaattgcagacgccagatagcgggtatataggtgtatattgtaccattcttccaactttttagcatgattgcaatttttcat

SEQ ID NO: 26973 - DNA, 122 bp, Homo sapiens
  misc_feature (61)..(62): /note="This region represents a CpG dinucleotide"
  misc_feature (61)..(61): /note="Nucleotide may be methylated to form 5-methylcytosine"
atttcacaccttaaatgctaaaaacttctaacttgctttaggaattgggggcagtgaacacgcaacccgaatccctctcacttatccatcgtgttgaggagcatttcacaggtcacgccttc

SEQ ID NO: 26974 - DNA, 122 bp, Homo sapiens
  misc_feature (61)..(62): /note="This region represents a CpG dinucleotide"
  misc_feature (61)..(61): /note="Nucleotide may be methylated to form 5-methylcytosine"
attggctgggccctggcagccggaaatgtcaccagccacacagcgtggagctggctctcccgcggccaccacagacctgagcccaggaggctctgtgacaaggcacagacctaccacagaga

SEQ ID NO: 26975 - DNA, 122 bp, Homo sapiens
  misc_feature (61)..(62): /note="This region represents a CpG dinucleotide"
  misc_feature (61)..(61): /note="Nucleotide may be methylated to form 5-methylcytosine"
gactacaccttctgtagcttgggtttggttcccaagttgtcatgtttcaggaatgaagaacgggatattcaagaagacttctctcaaatgacgggctatttacagagcatttagatctggtt

SEQ ID NO: 26976 - DNA, 122 bp, Homo sapiens
  misc_feature (61)..(62): /note="This region represents a CpG dinucleotide"
  misc_feature (61)..(61): /note="Nucleotide may be methylated to form 5-methylcytosine"
gtgtgctatcgtctttgttttgtgaatacattttcttaatgacatttggaggccttcagtcgttctgcagccaccagagttgtggcaaagtgggaatgctgtccatttgacagtgttgtttc

SEQ ID NO: 26977 - DNA, 122 bp, Homo sapiens
  misc_feature (61)..(62): /note="This region represents a CpG dinucleotide"
  misc_feature (61)..(61): /note="Nucleotide may be methylated to form 5-methylcytosine"
cagagtgtgctaacctgcacatcttgaaggactaacatcttccaggtttgctgttgtttacgtgctgcctgtgaaaagcagagttttgagtgttttcagcaccaaagtcccctcaaagcaaa

SEQ ID NO: 26978 - DNA, 122 bp, Homo sapiens
  misc_feature (61)..(62): /note="This region represents a CpG dinucleotide"
  misc_feature (61)..(61): /note="Nucleotide may be methylated to form 5-methylcytosine"
gactcaaatgggaaagaattaagagctcaagtgcctgccttttacaggtctacagggagacgtgaaatgatatttccagtttggggctgggaaagacccagtctattgttcctctggggccc

SEQ ID NO: 26979 - DNA, 122 bp, Homo sapiens
  misc_feature (61)..(62): /note="This region represents a CpG dinucleotide"
  misc_feature (61)..(61): /note="Nucleotide may be methylated to form 5-methylcytosine"
ttcagttggctctactatctgccgccagggctgctccgaaccactccacaagtcaaaacgcgctttcactctgtctcggcatactctgcttccctgtaacacaggcggtggaaattccagat

SEQ ID NO: 26980 - DNA, 122 bp, Homo sapiens
  misc_feature (61)..(62): /note="This region represents a CpG dinucleotide"
  misc_feature (61)..(61): /note="Nucleotide may be methylated to form 5-methylcytosine"
aacacaagaagcatgtggcatagctcgagatctcactcatgggaagacctcactgttgggcgtttctctttctattaagagtatgaaggcagtcagcataatatgcgtgttcaacagaaaag

SEQ ID NO: 26981 - DNA, 122 bp, Homo sapiens
  misc_feature (61)..(62): /note="This region represents a CpG dinucleotide"
  misc_feature (61)..(61): /note="Nucleotide may be methylated to form 5-methylcytosine"
tcaggcacggaaatttcaacagtacttggcaatttcctagcagcttacaactgctgatcccgccaacacagggagtttagatgcagtttcctcgtccttctagtttctataaatgtccttcc

SEQ ID NO: 26982 - DNA, 122 bp, Homo sapiens
  misc_feature (61)..(62): /note="This region represents a CpG dinucleotide"
  misc_feature (61)..(61): /note="Nucleotide may be methylated to form 5-methylcytosine"
gagtttctcagatcagtcaattccaggacagggtggcattggcaggattatcccagagtccgtaagagctgtggctgcatctttcagcccaaggacaaatctgaggtctgctggtaagttaa

SEQ ID NO: 26983 - DNA, 122 bp, Homo sapiens
  misc_feature (61)..(62): /note="This region represents a CpG dinucleotide"
  misc_feature (61)..(61): /note="Nucleotide may be methylated to form 5-methylcytosine"
acacaggacatatattagggtcctcattttaaagacggagactctagactcatggggtgacgtgagattaagatttgggacacataacatgaaacagctagaggaaattgctaaagcaggag

SEQ ID NO: 26984 - DNA, 122 bp, Homo sapiens
  misc_feature (61)..(62): /note="This region represents a CpG dinucleotide"
  misc_feature (61)..(61): /note="Nucleotide may be methylated to form 5-methylcytosine"
gttgcttttgagaattttaaacataccctcttatttcgaggcagcgaacctcagcagttccggctttgctgttagctcttttgtctttgttcccgggactcaggggctgtgttgctgctggc

SEQ ID NO: 26985 - DNA, 122 bp, Homo sapiens
  misc_feature (61)..(62): /note="This region represents a CpG dinucleotide"
  misc_feature (61)..(61): /note="Nucleotide may be methylated to form 5-methylcytosine"
agcccagaaaccaagggcgtggcgggactcacaggcagggagcggtgaggcagagctgtccgctggagcgagcccctgctctagggccatggccctcggggtccgttcatgcagcaagccac

SEQ ID NO: 26986 - DNA, 122 bp, Homo sapiens
  misc_feature (61)..(62): /note="This region represents a CpG dinucleotide"
  misc_feature (61)..(61): /note="Nucleotide may be methylated to form 5-methylcytosine"
tggaagcactactggctttcaagctttcacaattctctgaaggattctgcaacaccacagcgtgagtaatgaggacatgtcataagtactatgtacaacttgtaatgaaggttgtagatcaa

SEQ ID NO: 26987 - DNA, 122 bp, Homo sapiens
  misc_feature (61)..(62): /note="This region represents a CpG dinucleotide"
  misc_feature (61)..(61): /note="Nucleotide may be methylated to form 5-methylcytosine"
ctatatgtagaagcagagatccactggatgcacatacaagaaggaaccagtgtgaacaggcggcagcaccaatgtgaaaatgagtgagctggaatatactgcttcatggccaagctgatcca

SEQ ID NO: 26988 - DNA, 122 bp, Homo sapiens
  misc_feature (61)..(62): /note="This region represents a CpG dinucleotide"
  misc_feature (61)..(61): /note="Nucleotide may be methylated to form 5-methylcytosine"
aaggagatactactctacacccatgagaatggctataattaggggaacaaaggagacacgcgtcagcaaggatatggggaaactggaccctcctacattgtgggtagaaatgtaaaaccgtg

SEQ ID NO: 26989 - DNA, 122 bp, Homo sapiens
  misc_feature (61)..(62): /note="This region represents a CpG dinucleotide"
  misc_feature (61)..(61): /note="Nucleotide may be methylated to form 5-methylcytosine"
gtatgtgagcccctgccctgatggttttacccacagatgtgtgtcaatgtgagtgtgccccgtgcagatgttccaagttcttcccctcacttgagctcaattccatacaggtgttcctccta

SEQ ID NO: 26990 - DNA, 122 bp, Homo sapiens
  misc_feature (61)..(62): /note="This region represents a CpG dinucleotide"
  misc_feature (61)..(61): /note="Nucleotide may be methylated to form 5-methylcytosine"
cctctggttgctgaataagctgtcctcatgaaggttgctgaccttgcctgaccctggggacgtgaacaatactctgagaggatgctcagggaaggcaggacatgcttattggccagtggtga

SEQ ID NO: 26991 - DNA, 122 bp, Homo sapiens
  misc_feature (61)..(62): /note="This region represents a CpG dinucleotide"
  misc_feature (61)..(61): /note="Nucleotide may be methylated to form 5-methylcytosine"
gtgcccaagacatttttaattcatatcctggtgacaagtgagcattgaaaacccaagactcgtagatgagaagaattgaagcacacagacacctgagcacagagattagagattgatggtct

SEQ ID NO: 26992 - DNA, 122 bp, Homo sapiens
  misc_feature (61)..(62): /note="This region represents a CpG dinucleotide"
  misc_feature (61)..(61): /note="Nucleotide may be methylated to form 5-methylcytosine"
tcactccagtgttttcaatcttcatatctccttacttctttatccttgactttcttgcctcgctcttataaggtcattatatttagggctcatccagataatccaggataatctccccattt

SEQ ID NO: 26993 - DNA, 122 bp, Homo sapiens
  misc_feature (61)..(62): /note="This region represents a CpG dinucleotide"
  misc_feature (61)..(61): /note="Nucleotide may be methylated to form 5-methylcytosine"
tggttaccatttaataactccatattagcagaattcaggccactctcataatcctaacctcgtgggctttcattagttttatgaaggcagtttagttttgggaagggctagtatcacccttg

SEQ ID NO: 26994 - DNA, 122 bp, Homo sapiens
  misc_feature (61)..(62): /note="This region represents a CpG dinucleotide"
  misc_feature (61)..(61): /note="Nucleotide may be methylated to form 5-methylcytosine"
agctgggcgtggtagtgcatgcctgtaatcccagctactcaggtggctgcatgagaatcacgtgaacccgggaggtggatgttgccattgtgccactggcaccctagcctgggcaacagagc

SEQ ID NO: 26995 - DNA, 122 bp, Homo sapiens
  misc_feature (61)..(62): /note="This region represents a CpG dinucleotide"
  misc_feature (61)..(61): /note="Nucleotide may be methylated to form 5-methylcytosine"
cttcatcattcacaagcttttacagggaacaggtttggggctagcactgcactaggaaaacgcagtgaaatccttggtcccagactgtaacgaatgttgagtgtgaaatgtactcactccat

SEQ ID NO: 26996 - DNA, 122 bp, Homo sapiens
  misc_feature (61)..(62): /note="This region represents a CpG dinucleotide"
  misc_feature (61)..(61): /note="Nucleotide may be methylated to form 5-methylcytosine"
ctgcccagatgatatgaatgaatagattttataatggaaaaggaacttctgaaagattagcgactagcaggaagagtaaatgctggtcaaacatagttttggcaaatgatatatttcaagtt

SEQ ID NO: 26997 - DNA, 122 bp, Homo sapiens
  misc_feature (61)..(62): /note="This region represents a CpG dinucleotide"
  misc_feature (61)..(61): /note="Nucleotide may be methylated to form 5-methylcytosine"
gacaccatgatgagtgatgtagctctcctgctgccagcttacctatcatcggctgtaacacgccctcggcaattttaatgagctgctggtagatctgaatggaaaggtcactcagcacctga

SEQ ID NO: 26998 - DNA, 122 bp, Homo sapiens
  misc_feature (61)..(62): /note="This region represents a CpG dinucleotide"
  misc_feature (61)..(61): /note="Nucleotide may be methylated to form 5-methylcytosine"
aacaaagacgtagctccttctgggtagggcattttgttcatgctctcagatgccgcctaccgccctagagcaggaaatagcggtcagcgccagctgtgaggagcacagcattgcggccaaca

SEQ ID NO: 26999 - DNA, 122 bp, Homo sapiens
  misc_feature (61)..(62): /note="This region represents a CpG dinucleotide"
  misc_feature (61)..(61): /note="Nucleotide may be methylated to form 5-methylcytosine"
aattttattataaaataaaagcagaaatatttcccgaagaacattcacatgagggcattacggggagacggcaagtcggcggctcggggggcgcgctcagccgggagcgctgtagtcacagt

SEQ ID NO: 27000 - DNA, 122 bp, Homo sapiens
  misc_feature (61)..(62): /note="This region represents a CpG dinucleotide"
  misc_feature (61)..(61): /note="Nucleotide may be methylated to form 5-methylcytosine"
tcacacttaagaaatgtactgccttaaatgttgtatcttcattagagtgcatgatctttccgtgtttattttgttaaatattgttaactttcatacttttcacagaagtcttccaattactc

SEQ ID NO: 27001 - DNA, 122 bp, Homo sapiens
  misc_feature (61)..(62): /note="This region represents a CpG dinucleotide"
  misc_feature (61)..(61): /note="Nucleotide may be methylated to form 5-methylcytosine"
tctgagaacaggcattttcttctaagtcttccacacacagcgtgggaatgtgtgggaggccgggcgtctgtgcttgagtgtaagtcggggcattgagagaatgacgccgtgtgtgataggcc

SEQ ID NO: 27002 - DNA, 122 bp, Homo sapiens
  misc_feature (61)..(62): /note="This region represents a CpG dinucleotide"
  misc_feature (61)..(61): /note="Nucleotide may be methylated to form 5-methylcytosine"
catggctactgccaaggaaagggaggctggaaatgccatgtaattgtgagttcagcagaacgaaaagcaggtttggtgactaactcgccaggctctgccacaaggtcttcctctgggattag

SEQ ID NO: 27003 - DNA, 122 bp, Homo sapiens
  misc_feature (61)..(62): /note="This region represents a CpG dinucleotide"
  misc_feature (61)..(61): /note="Nucleotide may be methylated to form 5-methylcytosine"
agccatcttgtcgcccaagccagaaacccaaacatcaatcaatcctgtcccagactccctcgtgcaactgcaatcattgtaagatctacctgtttactctcaaaggggcctctctgcacccc

SEQ ID NO: 27004 - DNA, 122 bp, Homo sapiens
  misc_feature (61)..(62): /note="This region represents a CpG dinucleotide"
  misc_feature (61)..(61): /note="Nucleotide may be methylated to form 5-methylcytosine"
aaaaggaactgaatgagatcatcttcataaagtgcccagcccagcagctggcacttggtacgcacagaataaatgtttgctattcttatcagttgtccattaattcaacaggcattatggta

SEQ ID NO: 27005 - DNA, 122 bp, Homo sapiens
  misc_feature (61)..(62): /note="This region represents a CpG dinucleotide"
  misc_feature (61)..(61): /note="Nucleotide may be methylated to form 5-methylcytosine"
aaagcaggacatgaatttacaaagtcaaaaaatctcacttcccctctctaacagggagaacgaaggttaaccactgaagacaattttagacccttaagggcgtgaagattgcaccagagtga

SEQ ID NO: 27006 - DNA, 122 bp, Homo sapiens
  misc_feature (61)..(62): /note="This region represents a CpG dinucleotide"
  misc_feature (61)..(61): /note="Nucleotide may be methylated to form 5-methylcytosine"
tccccgccagctggcaaggtggggcaccactttggcttgtcggcctgtcctgtcgggtgacgtgcggttggcagagcccttctgtgagctgcctggctgcaagtcccactcctagtccctgc

SEQ ID NO: 27007 - DNA, 122 bp, Homo sapiens
  misc_feature (61)..(62): /note="This region represents a CpG dinucleotide"
  misc_feature (61)..(61): /note="Nucleotide may be methylated to form 5-methylcytosine"
cgtccgggacgttctgcagccctatgtgcaggaaagccagaacaagttcttcaagctgcccgtgtccgtggtcaacaccacactgccgtgcgtggcctacgtgctgctgtcactcgtgtact

SEQ ID NO: 27008 - DNA, 122 bp, Homo sapiens
  misc_feature (61)..(62): /note="This region represents a CpG dinucleotide"
  misc_feature (61)..(61): /note="Nucleotide may be methylated to form 5-methylcytosine"
tggtctgcaggtgctggaggagggcaggacgctacacccaagacctaccacagacactcacgcagaatgcagctgccacaggttagggccaggaacctaaacgcacccctaagttggaggca

SEQ ID NO: 27009 - DNA, 122 bp, Homo sapiens
  misc_feature (61)..(62): /note="This region represents a CpG dinucleotide"
  misc_feature (61)..(61): /note="Nucleotide may be methylated to form 5-methylcytosine"
tcttccaggagaactggcaggatttgaattgccaacatcttggaaatccatgcagaaagacgccatataaaatgtcttttaaactgagattgagttaaaggttctgctgtgtagaaaccaag

SEQ ID NO: 27010 - DNA, 122 bp, Homo sapiens
  misc_feature (61)..(62): /note="This region represents a CpG dinucleotide"
  misc_feature (61)..(61): /note="Nucleotide may be methylated to form 5-methylcytosine"
acatttgatttggtgaccaactaaaatgttttaacaggcttatgtatacagttcacagcgcgtttctaacgcgagagatctctgagggcatgatcctgtgtacaaaccactcctacttcccc

SEQ ID NO: 27011 - DNA, 122 bp, Homo sapiens
  misc_feature (61)..(62): /note="This region represents a CpG dinucleotide"
  misc_feature (61)..(61): /note="Nucleotide may be methylated to form 5-methylcytosine"
gtaataggtcctgtcacctctggccagggagatgtgcttctgaggtgcacacatggctgccgtgacccacacttgtggtgtgggaaggcagttttcaggacaatgggatgacccatgggctg

SEQ ID NO: 27012 - DNA, 122 bp, Homo sapiens
  misc_feature (61)..(62): /note="This region represents a CpG dinucleotide"
  misc_feature (61)..(61): /note="Nucleotide may be methylated to form 5-methylcytosine"
agcctgggtggaggtgtggggtggggagcaaatgctcttctgaaactgctatgccactgacgcttgcatatggctttaggttcacagtgggctgataaaaaatcacattgcatacatggtca

SEQ ID NO: 27013 - DNA, 122 bp, Homo sapiens
  misc_feature (61)..(62): /note="This region represents a CpG dinucleotide"
  misc_feature (61)..(61): /note="Nucleotide may be methylated to form 5-methylcytosine"
gagtcacccgacaaggcagggtggggctgccaaagcctatggcctagagagctgagggcacgaccacagccctgtggccagcattctcgagactccaaagataggcccggccagtgccccca

SEQ ID NO: 27014 - DNA, 122 bp, Homo sapiens
  misc_feature (61)..(62): /note="This region represents a CpG dinucleotide"
  misc_feature (61)..(61): /note="Nucleotide may be methylated to form 5-methylcytosine"
tcactgttgcgtgaggttagccctgcttggcctgaagctctaacctcttactgtaggtcacgtgttcatagaggagccctgtgcaggaccctcagtacctctaaggacacctaggactttga

SEQ ID NO: 27015 - DNA, 122 bp, Homo sapiens
  misc_feature (61)..(62): /note="This region represents a CpG dinucleotide"
  misc_feature (61)..(61): /note="Nucleotide may be methylated to form 5-methylcytosine"
actttttgggtttggatgtagctctaagtcttagctcagtcaggaatttgctaagcttgtcgttttctacatttcctttcattatggctagatagatccaagctaaaatctggtttatgctt

SEQ ID NO: 27016 - DNA, 122 bp, Homo sapiens
  misc_feature (61)..(62): /note="This region represents a CpG dinucleotide"
  misc_feature (61)..(61): /note="Nucleotide may be methylated to form 5-methylcytosine"
agaccgtgctggttgcacaagataaaaaggaaaagcagaagttattttctacgattgctacggaataatgggaaaaggagaactaagaaagtttactacttctaaagtccaatgaaaccatt

SEQ ID NO: 27017 - DNA, 122 bp, Homo sapiens
  misc_feature (61)..(62): /note="This region represents a CpG dinucleotide"
  misc_feature (61)..(61): /note="Nucleotide may be methylated to form 5-methylcytosine"
catttcagccatttccaggtccaaaccccacggcagccccctccccaaaactctggaaggcggagacctaaggcgacaggtctgcacagttcctcacaccagtggacaaaagtatggtgcga

SEQ ID NO: 27018 - DNA, 122 bp, Homo sapiens
  misc_feature (61)..(62): /note="This region represents a CpG dinucleotide"
  misc_feature (61)..(61): /note="Nucleotide may be methylated to form 5-methylcytosine"
tacctcggcttagtcatctatagaataggagtaatagtggtatatacttgacagagatgtcgcattaaataattcatgtgaagtactccaagcagttgctgctttctcataagccttcgata

SEQ ID NO: 27019 - DNA, 122 bp, Homo sapiens
  misc_feature (61)..(62): /note="This region represents a CpG dinucleotide"
  misc_feature (61)..(61): /note="Nucleotide may be methylated to form 5-methylcytosine"
acattttagggcactttccgtcaatggcaattgcaggagtggaagttgctctgggtgagacgatgaggaagtggttagtgaatgtaaagacccaggacattactgtacactagtatagacag

SEQ ID NO: 27020 - DNA, 122 bp, Homo sapiens
  misc_feature (61)..(62): /note="This region represents a CpG dinucleotide"
  misc_feature (61)..(61): /note="Nucleotide may be methylated to form 5-methylcytosine"
gcttggcccggccccaggggggcagggctcccaattgggggtggagggtggcctgggcaacgggcagcagctcctgcccctggggccccggccacacggaagtggctgttgaagaggaagct

SEQ ID NO: 27021 - DNA, 122 bp, Homo sapiens
  misc_feature (61)..(62): /note="This region represents a CpG dinucleotide"
  misc_feature (61)..(61): /note="Nucleotide may be methylated to form 5-methylcytosine"
tgcacactcccacacacacgggtgcacgctcccacacacttgggcgcacactcccacacacgcccctgcacacaccgagctgagtggtgtgggcagggaggcacccccgcagcaggtcagag

SEQ ID NO: 27022 - DNA, 122 bp, Homo sapiens
  misc_feature (61)..(62): /note="This region represents a CpG dinucleotide"
  misc_feature (61)..(61): /note="Nucleotide may be methylated to form 5-methylcytosine"
agactggcatatagaatgtgctcactaaaacctggactggctgattgctgaggccttcagcgggaattttacaaaagcacttgggcatgtgaattgcacaacaggtgctcaaaggctatagg

SEQ ID NO: 27023 - DNA, 122 bp, Homo sapiens
  misc_feature (61)..(62): /note="This region represents a CpG dinucleotide"
  misc_feature (61)..(61): /note="Nucleotide may be methylated to form 5-methylcytosine"
cctcacttctggattagggacagcactttccaatctcttttcctacctttagtctgatttcgcttcaacacatcttacgaaagacctagagtaatttcataatcacattcatgctccaaagc

SEQ ID NO: 27024 - DNA, 122 bp, Homo sapiens
  misc_feature (61)..(62): /note="This region represents a CpG dinucleotide"
  misc_feature (61)..(61): /note="Nucleotide may be methylated to form 5-methylcytosine"
tccagactgggtgacacagtgaggccctgtatcaaaaaaaaaaaaaaaaaaaaagaaaatcgcagagtacaaaaactaagagatgcattctggaaaaataacaaaacgtgccgccagtccta

SEQ ID NO: 27025 - DNA, 122 bp, Homo sapiens
  misc_feature (61)..(62): /note="This region represents a CpG dinucleotide"
  misc_feature (61)..(61): /note="Nucleotide may be methylated to form 5-methylcytosine"
gtgctctctaatcattgggctgctgcctggtctgcatgactatcctgagagtcactctgtcggtagccttgttcattcaattactatcatctccacctcattccattgcttctactccctat

SEQ ID NO: 27026 - DNA, 122 bp, Homo sapiens
  misc_feature (61)..(62): /note="This region represents a CpG dinucleotide"
  misc_feature (61)..(61): /note="Nucleotide may be methylated to form 5-methylcytosine"
aatgctttgaaaactaaagaaaatcacgttatattagaagccttaccctggtttcactttcgctgaagatatcactgtttgccacacaggcaatcagggagctaaaactgtagttaaagttt

SEQ ID NO: 27027 - DNA, 122 bp, Homo sapiens
  misc_feature (61)..(62): /note="This region represents a CpG dinucleotide"
  misc_feature (61)..(61): /note="Nucleotide may be methylated to form 5-methylcytosine"
ggtggataggaggagctttagggttagacaggcctgggttggaatcccagctctgtgcctcgctgtcactagctgtgtgtcctggggcttgttcttgaacttcactttcctagattgccaag

SEQ ID NO: 27028 - DNA, 122 bp, Homo sapiens
  misc_feature (61)..(62): /note="This region represents a CpG dinucleotide"
  misc_feature (61)..(61): /note="Nucleotide may be methylated to form 5-methylcytosine"
cccaagcacatttgctgtgctcctcctaaggtaaataacagcatccactgtgctcagccacggcttaaagcccttctagattgcatacaactcaggcagggtcattctgactcactccctca

SEQ ID NO: 27029 - DNA, 122 bp, Homo sapiens
  misc_feature (61)..(62): /note="This region represents a CpG dinucleotide"
  misc_feature (61)..(61): /note="Nucleotide may be methylated to form 5-methylcytosine"
ctctcttgggcaacttaacaagtaaagagtggtaatgataccccttactcgcctcacaaacgagctgggaagaatgaagtctgcaaaacacaatgagactccactggaaagagagaactgtt

SEQ ID NO: 27030 - DNA, 122 bp, Homo sapiens
  misc_feature (61)..(62): /note="This region represents a CpG dinucleotide"
  misc_feature (61)..(61): /note="Nucleotide may be methylated to form 5-methylcytosine"
gcagaactattttaatagccttttttgcagtttcctcttccttcagctctattcaagccacgcttcctggtgactttatttacgttcttcaaatacagatatggttatttcttctccactca

SEQ ID NO: 27031 - DNA, 122 bp, Homo sapiens
  misc_feature (61)..(62): /note="This region represents a CpG dinucleotide"
  misc_feature (61)..(61): /note="Nucleotide may be methylated to form 5-methylcytosine"
gggcaggaaggaagataccagtgccctaggcctgcttagtgtgctgcctctggggagtcccgccccatttcattcaaggaaggcctctccagtcctgtcggtgccatcctcaacctcatggg

SEQ ID NO: 27032 - DNA, 122 bp, Homo sapiens
  misc_feature (61)..(62): /note="This region represents a CpG dinucleotide"
  misc_feature (61)..(61): /note="Nucleotide may be methylated to form 5-methylcytosine"
ctaaatagtccttcttacaagcttgcccgtttctcaccatcaaatcaaaaggcccagtaacggttgtgccacctggtcctgttgattgtgcagccacactctgtttggcagtaaaagaggaa

SEQ ID NO: 27033 - DNA, 122 bp, Homo sapiens
  misc_feature (61)..(62): /note="This region represents a CpG dinucleotide"
  misc_feature (61)..(61): /note="Nucleotide may be methylated to form 5-methylcytosine"
ctaactgagatgcaccaggcataggcttagccatctttcttttctactgactcataagaacgagtcagggaaatgtgtgttgcttcttcaagctctgcaggcaatggttatgtgcagtcttg

SEQ ID NO: 27034 - DNA, 122 bp, Homo sapiens
  misc_feature (61)..(62): /note="This region represents a CpG dinucleotide"
  misc_feature (61)..(61): /note="Nucleotide may be methylated to form 5-methylcytosine"
cctggacagaaacaatcaggatggcctctcatcagaaacaggtccataggggtgagccagcggtcaacaagtcacaggataaacctggtacagcataacaggaagggttggatatattatgg

SEQ ID NO: 27035 - DNA, 122 bp, Homo sapiens
  misc_feature (61)..(62): /note="This region represents a CpG dinucleotide"
  misc_feature (61)..(61): /note="Nucleotide may be methylated to form 5-methylcytosine"
gtgtcctggataacctgtctgtcactggtttagactttcacaccataccggacagcgtggcgccccatagtcaccgccacccacatcgggtcccacatccgagtaggtggagtattgacttg

SEQ ID NO: 27036 - DNA, 122 bp, Homo sapiens
  misc_feature (61)..(62): /note="This region represents a CpG dinucleotide"
  misc_feature (61)..(61): /note="Nucleotide may be methylated to form 5-methylcytosine"
cgccaggctggactgtgtctggttccccccatcgtgcctgggccctcatctctccttccccgctccgcagcagccaagattcacagtctgtctattaatgaaatgcctccccgtctctttcc

SEQ ID NO: 27037 - DNA, 122 bp, Homo sapiens
  misc_feature (61)..(62): /note="This region represents a CpG dinucleotide"
  misc_feature (61)..(61): /note="Nucleotide may be methylated to form 5-methylcytosine"
tgctaagttggcaatttgcctgaggccagaattcagaaacatccggtaatacataatacccggctttctagagctctgagacattttatggaatttacaagtaatttcaagttttccttttg

SEQ ID NO: 27038 - DNA, 122 bp, Homo sapiens
  misc_feature (61)..(62): /note="This region represents a CpG dinucleotide"
  misc_feature (61)..(61): /note="Nucleotide may be methylated to form 5-methylcytosine"
ccccatcaccccgcctctgccccacaagcctcccaaccacagccgccgcctcttcctcttcgcagggccacctcagcctttggactggcacctccttgggaacttttggccaagatatgggc

SEQ ID NO: 27039 - DNA, 122 bp, Homo sapiens
  misc_feature (61)..(62): /note="This region represents a CpG dinucleotide"
  misc_feature (61)..(61): /note="Nucleotide may be methylated to form 5-methylcytosine"
tagagcaaacaacacatacaagacaataatgactcaaacagttcctttgggccaacaactcgcaatcaaataagacagtcagatatgacattccaagtacctggaagacgaaacatgtaaaa

SEQ ID NO: 27040 - DNA, 122 bp, Homo sapiens
  misc_feature (61)..(62): /note="This region represents a CpG dinucleotide"
  misc_feature (61)..(61): /note="Nucleotide may be methylated to form 5-methylcytosine"
acaggatttagccacagcatgacccggcaacttgggttcttaacgctggcaaaagccagccgaactaacagggagcaacttataaaaatgcaaagacgtacaagatcaaaacaaacaaaaaa

SEQ ID NO: 27041 - DNA, 122 bp, Homo sapiens
  misc_feature (61)..(62): /note="This region represents a CpG dinucleotide"
  misc_feature (61)..(61): /note="Nucleotide may be methylated to form 5-methylcytosine"
gcagaccattcccaggaatcagagcagcttgcacattcctgagaagtagccctggcacgtcgtcactaactctagcttgaaattggtggctcttggatgggtgtggtggctcacgcctgtaa

SEQ ID NO: 27042 - DNA, 122 bp, Homo sapiens
  misc_feature (61)..(62): /note="This region represents a CpG dinucleotide"
  misc_feature (61)..(61): /note="Nucleotide may be methylated to form 5-methylcytosine"
ggcagcatatgtgagtcaggccatggctgctgcagccacagtggggctttgtgctgtgatcgtgtgcagagcagagcagccactcagccatccactgactctccaaattgcttctgagcacc

SEQ ID NO: 27043 - DNA, 122 bp, Homo sapiens
  misc_feature (61)..(62): /note="This region represents a CpG dinucleotide"
  misc_feature (61)..(61): /note="Nucleotide may be methylated to form 5-methylcytosine"
aggtttatatgtcctaatcctagagatgaaagttgagcccatgattatgggttaggtcgacgagggagagagtttagaaagagaagacaacctagggaatgcttatatttggagcagaggaa

SEQ ID NO: 27044 - DNA, 122 bp, Homo sapiens
  misc_feature (61)..(62): /note="This region represents a CpG dinucleotide"
  misc_feature (61)..(61): /note="Nucleotide may be methylated to form 5-methylcytosine"
ttcttaaatggcagcagcaacatcaacccttagtctcggtcacaagatgtaagttgcaagcgtaatttaaaaactagggaagtgctgtggagcttgtggctgtggtgttgtctttttgagat

SEQ ID NO: 27045 - DNA, 122 bp, Homo sapiens
  misc_feature (61)..(62): /note="This region represents a CpG dinucleotide"
  misc_feature (61)..(61): /note="Nucleotide may be methylated to form 5-methylcytosine"
ctgatggctttgaattcaggggctcaatatttaacttcctctttttatgatatctttgttcgtcttttcttggtgacttccagttgacaacttctaactctgcttctctgtttgtttcccag

SEQ ID NO: 27046 - DNA, 122 bp, Homo sapiens
  misc_feature (61)..(62): /note="This region represents a CpG dinucleotide"
  misc_feature (61)..(61): /note="Nucleotide may be methylated to form 5-methylcytosine"
ctatatctttctcttgttctctctctgtttctctggagaaccctgactaataatatactacgtaagggagattagaaagtatttaaggagctccaccaaaaggaagctgctccctgataaga

SEQ ID NO: 27047 - DNA, 122 bp, Homo sapiens
  misc_feature (61)..(62): /note="This region represents a CpG dinucleotide"
  misc_feature (61)..(61): /note="Nucleotide may be methylated to form 5-methylcytosine"
gtgatcactcaggcagctgcagccatggaggcagcagtgttccaggagcaaaaactccctcgtgtaagcatctaccaagcctctgtttgcgtatttgctgatattccaccagccaaaatgag

SEQ ID NO: 27048 - DNA, 122 bp, Homo sapiens
  misc_feature (61)..(62): /note="This region represents a CpG dinucleotide"
  misc_feature (61)..(61): /note="Nucleotide may be methylated to form 5-methylcytosine"
ccaggcaagcacggagcagggtgacttcccagaggctgtgtcctcccaggagtccctgtccggggtgccaggagtagagaggctgagtgcgcccactgcagccccgggaccaggatggcacc

SEQ ID NO: 27049 - DNA, 122 bp, Homo sapiens
  misc_feature (61)..(62): /note="This region represents a CpG dinucleotide"
  misc_feature (61)..(61): /note="Nucleotide may be methylated to form 5-methylcytosine"
taaaatgactcagccccatggactccaattgcctctgtttaccataaatagaaatagtcacgtaaagtaaaaggtcaacattctagatctccatgaatcattcactgaagtcatggagaaaa

SEQ ID NO: 27050 - DNA, 122 bp, Homo sapiens
  misc_feature (61)..(62): /note="This region represents a CpG dinucleotide"
  misc_feature (61)..(61): /note="Nucleotide may be methylated to form 5-methylcytosine"
gtggcctcctctggtcacgtgaggcccgtgatgggacacactgggtgcccctctctgtaacgggttccccaggaccacaggtgctgccaaagatattttgtgtcacataaacttagaaacgt

SEQ ID NO: 27051 - DNA, 122 bp, Homo sapiens
  misc_feature (61)..(62): /note="This region represents a CpG dinucleotide"
  misc_feature (61)..(61): /note="Nucleotide may be methylated to form 5-methylcytosine"
gcctttcactggggccaccctttggcttatatcacaatgtacttttttgggttcactgtccgttcccctaaggctcttggcctcccatgaaggctggggccctggcagacagaaccagcagg

SEQ ID NO: 27052 - DNA, 122 bp, Homo sapiens
  misc_feature (61)..(62): /note="This region represents a CpG dinucleotide"
  misc_feature (61)..(61): /note="Nucleotide may be methylated to form 5-methylcytosine"
gaggttcccaagcctggcagcagatccttaaggctgattcattcagcacatctgattgagcgtgtctgacttggcaaatgggaatgaactagaagatcagtgccttggagctgcagtatgtg

SEQ ID NO: 27053 - DNA, 122 bp, Homo sapiens
  misc_feature (61)..(62): /note="This region represents a CpG dinucleotide"
  misc_feature (61)..(61): /note="Nucleotide may be methylated to form 5-methylcytosine"
gataaaacatccttttagcagcaatctgataaatatggtagaatccttttaaccaacttccgcttaaccaactgtccagattaaccaatgagctccattccccttgtaaatcatactgactg

SEQ ID NO: 27054 - DNA, 122 bp, Homo sapiens
  misc_feature (61)..(62): /note="This region represents a CpG dinucleotide"
  misc_feature (61)..(61): /note="Nucleotide may be methylated to form 5-methylcytosine"
tcctcctgaattacttttgtgtcctttgacacgtcagatgtggctggggaaacagaaactcgcagaagttaaaaaaatgtgcttgaggtgccactggagaataacaatcatagccaggatgt

SEQ ID NO: 27055 - DNA, 122 bp, Homo sapiens
  misc_feature (61)..(62): /note="This region represents a CpG dinucleotide"
  misc_feature (61)..(61): /note="Nucleotide may be methylated to form 5-methylcytosine"
caaaactggagagttcctgactacagagtgtggcaggaggcagggtgttctgaactaagacggagaagctccccaaacaggatgtggttagggagagggggatgtggttagggtgagggaga

SEQ ID NO: 27056 - DNA, 122 bp, Homo sapiens
  misc_feature (61)..(62): /note="This region represents a CpG dinucleotide"
  misc_feature (61)..(61): /note="Nucleotide may be methylated to form 5-methylcytosine"
ttttcatctgagtgactgagtttcttcctgctgactgtttggagttcccctgtgagctggcgtaaggtacttcttcctgtggctcagagtaagactctgagagccttggggactgccctctg

SEQ ID NO: 27057 - DNA, 122 bp, Homo sapiens
  misc_feature (61)..(62): /note="This region represents a CpG dinucleotide"
  misc_feature (61)..(61): /note="Nucleotide may be methylated to form 5-methylcytosine"
gcctttttcccccataaatagaacaaacagatgctatctgcaaggcccacagcacatctgcgtggatgaagcagcagcactcaagtgtcctgggaaaggagtgatttgcatgtttgctatct

SEQ ID NO: 27058 - DNA, 122 bp, Homo sapiens
  misc_feature (61)..(62): /note="This region represents a CpG dinucleotide"
  misc_feature (61)..(61): /note="Nucleotide may be methylated to form 5-methylcytosine"
atcaaagcagaattgaaccgcccccttggtagacctgagaaatgtagacagacctgttggcgagccatgaaaatgttgcagagagagtcatcagaggcatctgtagctaaacatgctatgca

SEQ ID NO: 27059 - DNA, 122 bp, Homo sapiens
  misc_feature (61)..(62): /note="This region represents a CpG dinucleotide"
  misc_feature (61)..(61): /note="Nucleotide may be methylated to form 5-methylcytosine"
tcctgtaataggaccctgtctggtgcatccaagagtgaaagtgagagtgaaagtgtgccacgagggaggcaataggaggaaaagtattgaagccaactccattagaacatatgttgaagaac

SEQ ID NO: 27060 - DNA, 122 bp, Homo sapiens
  misc_feature (61)..(62): /note="This region represents a CpG dinucleotide"
  misc_feature (61)..(61): /note="Nucleotide may be methylated to form 5-methylcytosine"
gaatcccatcgaagacgatttgatctttcgagtgggtaaggagagggcttctgtgcccgacgcctgagctggcactggttaaggggtaactgggcacgtgtcattgcaaatagcaacactgc

SEQ ID NO: 27061 - DNA, 122 bp, Homo sapiens
  misc_feature (61)..(62): /note="This region represents a CpG dinucleotide"
  misc_feature (61)..(61): /note="Nucleotide may be methylated to form 5-methylcytosine"
acaaaaaggaggaaaaaaaaagatgcagactgacaaatgaattcaaatttctttgatccgcgtcctaactctaaggggacttcagataaatcaatgagtcacagaaggggcaggaagatgta

SEQ ID NO: 27062 - DNA, 122 bp, Homo sapiens
  misc_feature (61)..(62): /note="This region represents a CpG dinucleotide"
  misc_feature (61)..(61): /note="Nucleotide may be methylated to form 5-methylcytosine"
caggtgcaaaactgagcctcagttgactcatttggaaatagcagagttgtggtttactgacgtggaagcactggattggggcagacttattgtgtgcaacatgggccacattaacttggaaa

SEQ ID NO: 27063 - DNA, 122 bp, Homo sapiens
  misc_feature (61)..(62): /note="This region represents a CpG dinucleotide"
  misc_feature (61)..(61): /note="Nucleotide may be methylated to form 5-methylcytosine"
ctgacagagcctcagccccggcctttctgaagcaaataatccagcaacagccagcagtttcgcttccgggatttcctcttttgtttttctttatttgaatttttgtattaccatgtgtgccc

SEQ ID NO: 27064 - DNA, 122 bp, Homo sapiens
  misc_feature (61)..(62): /note="This region represents a CpG dinucleotide"
  misc_feature (61)..(61): /note="Nucleotide may be methylated to form 5-methylcytosine"
tgcagctcaccacggccaactgtgtgacatagtaacagttaacctccactgactggtcaccgtgctccaggcactgtcttaagtggcttgtattcattcctttaatcctcataacaccctga

SEQ ID NO: 27065 - DNA, 122 bp, Homo sapiens
  misc_feature (61)..(62): /note="This region represents a CpG dinucleotide"
  misc_feature (61)..(61): /note="Nucleotide may be methylated to form 5-methylcytosine"
aaagtatataaacccacaaaacaaatactttaatgtacttttgtgtatttctttttcttacgttattccattggctggaacctccagtacaatgttaaatagaagtgatgacagcagaaatc

SEQ ID NO: 27066 - DNA, 122 bp, Homo sapiens
  misc_feature (61)..(62): /note="This region represents a CpG dinucleotide"
  misc_feature (61)..(61): /note="Nucleotide may be methylated to form 5-methylcytosine"
ggatgactgtatcagaagcgacattcaggatgtctttgtaacaacatttcctatggactgcgtaacttctggcttctgtgccaacatttctgtagaaagaacacaaaaaatactaataattg

SEQ ID NO: 27067 - DNA, 122 bp, Homo sapiens
  misc_feature (61)..(62): /note="This region represents a CpG dinucleotide"
  misc_feature (61)..(61): /note="Nucleotide may be methylated to form 5-methylcytosine"
caccactgccaatgccctgccctcatattgcaaggctcccagagtggcaaaccatctgtgcgtaaagatctcaagcaatgtcactccacatagctcttcctcggtagcactgttgtttgctc

SEQ ID NO: 27068 - DNA, 122 bp, Homo sapiens
  misc_feature (61)..(62): /note="This region represents a CpG dinucleotide"
  misc_feature (61)..(61): /note="Nucleotide may be methylated to form 5-methylcytosine"
agaggcttgaggttgccagctgtggggggttgggcctgtgcagtgcctctcagccgcccacgctggtggggctctgcagtgttagcttcttgtttctctattttctacctaggtttcagttt

SEQ ID NO: 27069 - DNA, 122 bp, Homo sapiens
  misc_feature (61)..(62): /note="This region represents a CpG dinucleotide"
  misc_feature (61)..(61): /note="Nucleotide may be methylated to form 5-methylcytosine"
attctttaatctctctgctctacaggacttgaaacatagccttaaatgactaagtcttcacgtgagcatgacataacctggaaatcttcctataatggaactggccttgtgaaggtatttat

SEQ ID NO: 27070 - DNA, 122 bp, Homo sapiens
  misc_feature (61)..(62): /note="This region represents a CpG dinucleotide"
  misc_feature (61)..(61): /note="Nucleotide may be methylated to form 5-methylcytosine"
aagaaagcgcagaaacagacaagggacacacccacagaaacatatatagactgagaaagccgggtgcgggtgggaaggtgagggtggtcagatgaatcaagataggttgggggagagggaga

SEQ ID NO: 27071 - DNA, 122 bp, Homo sapiens
  misc_feature (61)..(62): /note="This region represents a CpG dinucleotide"
  misc_feature (61)..(61): /note="Nucleotide may be methylated to form 5-methylcytosine"
gattaactactatggaaactatctcccttactcccattgtgaacgagacacaatatatgacgtaaccttcagtcactggacaacaggcagcattaactatgatccctgagagaaggcaacaa

SEQ ID NO: 27072 - DNA, 122 bp, Homo sapiens
  misc_feature (61)..(62): /note="This region represents a CpG dinucleotide"
  misc_feature (61)..(61): /note="Nucleotide may be methylated to form 5-methylcytosine"
tttatatttacaattcaaactcaggaaatcaagctgcagagtccatgccctttactattacgtaaactgcctcttgttgattgactttattgaggaaaaagaaaaaatcttagaagttggag

SEQ ID NO: 27073 - DNA, 122 bp, Homo sapiens
  misc_feature (61)..(62): /note="This region represents a CpG dinucleotide"
  misc_feature (61)..(61): /note="Nucleotide may be methylated to form 5-methylcytosine"
taagatcaaaggaagtacagtgtaaaaaacttagcaaaaggtctatgccagagatctctgcggataaatcatgttgtgaataaggaagcctgccgatttgatcaaagaaatcaagaatatat

SEQ ID NO: 27074 - DNA, 122 bp, Homo sapiens
  misc_feature (61)..(62): /note="This region represents a CpG dinucleotide"
  misc_feature (61)..(61): /note="Nucleotide may be methylated to form 5-methylcytosine"
ttggtttcgtattttctatcatgtctatgcatacctttatcaaaataaaattgtttaggccggggcagtgacacatctgtaatcccagcattttgggaggttgtgatgggtggatcgcctga

SEQ ID NO: 27075 - DNA, 122 bp, Homo sapiens
  misc_feature (61)..(62): /note="This region represents a CpG dinucleotide"
  misc_feature (61)..(61): /note="Nucleotide may be methylated to form 5-methylcytosine"
aaacactggggatttgctcttaagtgaaacactagacagggaggagctctgcggttccatcgagccttgcgtgctacatttgcaggtgttaatgcaaaaccccacgcagtttttacaaattg

SEQ ID NO: 27076 - DNA, 122 bp, Homo sapiens
  misc_feature (61)..(62): /note="This region represents a CpG dinucleotide"
  misc_feature (61)..(61): /note="Nucleotide may be methylated to form 5-methylcytosine"
atccatggggctttagagactttgccaaagcagtgcgactgctcccaggttgttgtcagccgtcaagagtgagtgcacctccctgggcagacttctgctgccccagtgcccaggaataggca

SEQ ID NO: 27077 - DNA, 122 bp, Homo sapiens
  misc_feature (61)..(62): /note="This region represents a CpG dinucleotide"
  misc_feature (61)..(61): /note="Nucleotide may be methylated to form 5-methylcytosine"
atttcagtaaaactttgctgaggagcagctacgtgcaaatgctgttctagatcgtgttagcgggaggaagatgatttcaacaaggaagaatttggcattaatcctgcccttgtagggctcag

SEQ ID NO: 27078 - DNA, 122 bp, Homo sapiens
  misc_feature (61)..(62): /note="This region represents a CpG dinucleotide"
  misc_feature (61)..(61): /note="Nucleotide may be methylated to form 5-methylcytosine"
ctgatttctcagaagatcagataaacaatgtggttttggtctgatgatgtggaatcttagcgtaagtggctccattttgattttgtccgttctgttggggctcagcccaaaacaatgacctc

SEQ ID NO: 27079 - DNA, 122 bp, Homo sapiens
  misc_feature (61)..(62): /note="This region represents a CpG dinucleotide"
  misc_feature (61)..(61): /note="Nucleotide may be methylated to form 5-methylcytosine"
ctattgagtgagcttagttcattgctaaatatcttcatctcaacacagcttcattgttctcggcctattcaagtgtgaaatctcagtagtgaaatcttatgaaagggccacttaatttccat

SEQ ID NO: 27080 - DNA, 122 bp, Homo sapiens
  misc_feature (61)..(62): /note="This region represents a CpG dinucleotide"
  misc_feature (61)..(61): /note="Nucleotide may be methylated to form 5-methylcytosine"
gactgacaactggattctaccactcactggttctgtgaccatggacaagttcagattcctcgtctgtaaaatgggaatgataaagcagattcaatgagacagtgtatgaaacgtgtagatag

SEQ ID NO: 27081 - DNA, 122 bp, Homo sapiens
  misc_feature (61)..(62): /note="This region represents a CpG dinucleotide"
  misc_feature (61)..(61): /note="Nucleotide may be methylated to form 5-methylcytosine"
ccccacctcccttttctggctaggtacatacgaagtcatcctcccagatggctcagagggcgtctccttggcgagactccagtcctccacccacctatgcctgcctacctgccccccacccc

SEQ ID NO: 27082 - DNA, 122 bp, Homo sapiens
  misc_feature (61)..(62): /note="This region represents a CpG dinucleotide"
  misc_feature (61)..(61): /note="Nucleotide may be methylated to form 5-methylcytosine"
gttcagtaaatatttgttgaatgaaaggataaattctcatttatcttagggcatttgtaacggggcaaccagatggcttcaggaggcacctctgaagattctgcattgctcagattatgcat

SEQ ID NO: 27083 - DNA, 122 bp, Homo sapiens
  misc_feature (61)..(62): /note="This region represents a CpG dinucleotide"
  misc_feature (61)..(61): /note="Nucleotide may be methylated to form 5-methylcytosine"
attaccactgctacaatgtttaaagccaattacctgagcacatcataaggattctcttaccggttgtcccagttaagtaatgttgattgatcaactccttgacaggagctgatggcaaagaa

SEQ ID NO: 27084 - DNA, 122 bp, Homo sapiens
  misc_feature (61)..(62): /note="This region represents a CpG dinucleotide"
  misc_feature (61)..(61): /note="Nucleotide may be methylated to form 5-methylcytosine"
ttgaaatgatcattaattcccttctgtctcatttctgggatgcttagtccctggctcaggcgtggcagcagcaggtttatagttgaagaatctcttgtggctctcatgctgactgctgggag

SEQ ID NO: 27085 - DNA, 122 bp, Homo sapiens
  misc_feature (61)..(62): /note="This region represents a CpG dinucleotide"
  misc_feature (61)..(61): /note="Nucleotide may be methylated to form 5-methylcytosine"
cccttctgacagagggaagttgggcagtttggagataagaggagagagtaaagaaggtcacgtaagccctaagttgataacctgctccagggaaagcgacagccgtccaccatggccagagt

SEQ ID NO: 27086 - DNA, 122 bp, Homo sapiens
  misc_feature (61)..(62): /note="This region represents a CpG dinucleotide"
  misc_feature (61)..(61): /note="Nucleotide may be methylated to form 5-methylcytosine"
atctcacaaagccagcccagttatgacagagtcatgacttacgaagctcagctgagtgaccgtttcctctttttaatactgttctcagctctttaaatgtttgaacatagctaccatttctc

SEQ ID NO: 27087 - DNA, 122 bp, Homo sapiens
  misc_feature (61)..(62): /note="This region represents a CpG dinucleotide"
  misc_feature (61)..(61): /note="Nucleotide may be methylated to form 5-methylcytosine"
ttctgtaaaatgactagactcagctagaaagttctgctccatgtgatgctagctggctgccgtcacgtggaaggttgactaggctggaacatccaagatggcttagtcacatggccagcagt

SEQ ID NO: 27088 - DNA, 122 bp, Homo sapiens
  misc_feature (61)..(62): /note="This region represents a CpG dinucleotide"
  misc_feature (61)..(61): /note="Nucleotide may be methylated to form 5-methylcytosine"
gtgatttagaacaagagttcatccacaactacagcccttgggccaaatctagcctcagcccgtatttgtaaataaagtgttactggaacacaaccgtgcccatttctttagtcattgcctgt

SEQ ID NO: 27089 - DNA, 122 bp, Homo sapiens
  misc_feature (61)..(62): /note="This region represents a CpG dinucleotide"
  misc_feature (61)..(61): /note="Nucleotide may be methylated to form 5-methylcytosine"
gaggctctcatttctggagtaatagtgacatacatttgctgcaagaaattgcagcctcatcgcaaatgcctacacgcagtgtctatttcaacatcagaccacatttcattcattaattgtta

SEQ ID NO: 27090 - DNA, 122 bp, Homo sapiens
  misc_feature (61)..(62): /note="This region represents a CpG dinucleotide"
  misc_feature (61)..(61): /note="Nucleotide may be methylated to form 5-methylcytosine"
cccttcgatgtcaggagtgaatgcagcaatgcagacgtgccccacttatacaaggatactcgtgtatatgcatgtatgcacgtatgtatgtactggattcagcaatgacatccgcaaagcct

SEQ ID NO: 27091 - DNA, 122 bp, Homo sapiens
  misc_feature (61)..(62): /note="This region represents a CpG dinucleotide"
  misc_feature (61)..(61): /note="Nucleotide may be methylated to form 5-methylcytosine"
gagaggacagtggaccaggagagaggccagcattcttctgctctcttggtgagaatgaaccgtccattaagcctgtttgagattcatagtcatcacaaaaatgaaacagtggaactaggtta

SEQ ID NO: 27092 - DNA, 122 bp, Homo sapiens
  misc_feature (61)..(62): /note="This region represents a CpG dinucleotide"
  misc_feature (61)..(61): /note="Nucleotide may be methylated to form 5-methylcytosine"
ctggcacagcctgtgcccatatgtgaatagactttactgaaaggctctgcttcctccattcgtgactcagctttactcacactggctgtttcaaaagttgaagatgtacatcaatgcatgtt

SEQ ID NO: 27093 - DNA, 122 bp, Homo sapiens
  misc_feature (61)..(62): /note="This region represents a CpG dinucleotide"
  misc_feature (61)..(61): /note="Nucleotide may be methylated to form 5-methylcytosine"
gaagttaagcagcttgccacaggtgacacagttggtaggtggtgatgcagactggagcgacggcttcacctgctgcatgaacctgctctctgtaagggctgcgagagaaaggcccaggcctg

SEQ ID NO: 27094 - DNA, 122 bp, Homo sapiens
  misc_feature (61)..(62): /note="This region represents a CpG dinucleotide"
  misc_feature (61)..(61): /note="Nucleotide may be methylated to form 5-methylcytosine"
ctctacttgcatccacatatccaagggcctccaggagtggtctgtgatgtaatttcagctcgtaacaagctaggtgaatgctgaggtttgagggtaacagaaagtacttctctactggcctg

SEQ ID NO: 27095 - DNA, 122 bp, Homo sapiens
  misc_feature (61)..(62): /note="This region represents a CpG dinucleotide"
  misc_feature (61)..(61): /note="Nucleotide may be methylated to form 5-methylcytosine"
tactgttgctttctggccaaagacaggtcaagtgctgggaactctcgggactcacagtcacgctagtgacgtgctagagcacatctccccactgtggattatccagaatgactcaaacttgc

SEQ ID NO: 27096 - DNA, 122 bp, Homo sapiens
  misc_feature (61)..(62): /note="This region represents a CpG dinucleotide"
  misc_feature (61)..(61): /note="Nucleotide may be methylated to form 5-methylcytosine"
gtgctaagcatggccttgggcagctctctgagcttcagtagcttcacctgtgaatggagtcgtatcctcgatttcacagggccggtgtgaggaacgaggataacctcttcagaacatctacc

SEQ ID NO: 27097 - DNA, 122 bp, Homo sapiens
  misc_feature (61)..(62): /note="This region represents a CpG dinucleotide"
  misc_feature (61)..(61): /note="Nucleotide may be methylated to form 5-methylcytosine"
agaaaggagggaggtgctgggctgccctttgcagctggctgcctagggctagaagctcttcgggaggaggcggagaaaggggggttgagcatagaaggtgcccacctcctgctctcagcaat

SEQ ID NO: 27098 - DNA, 122 bp, Homo sapiens
  misc_feature (61)..(62): /note="This region represents a CpG dinucleotide"
  misc_feature (61)..(61): /note="Nucleotide may be methylated to form 5-methylcytosine"
gtgagtagaaggcagcaaggcatgagttattgtaactgataaagcaggggtggcgcagtgcggggttggtggggaggtgattgatcaagtgagtcatcatcctgccccagggaacaatggtc

SEQ ID NO: 27099 - DNA, 122 bp, Homo sapiens
  misc_feature (61)..(62): /note="This region represents a CpG dinucleotide"
  misc_feature (61)..(61): /note="Nucleotide may be methylated to form 5-methylcytosine"
agtttgttttaaatcacgattatgcattttagtccaaacatatattctttatgctatacacgattattaattctttcttattcaaagcaaggcagttttcaaggtttaaaactgatgggttg

SEQ ID NO: 27100 - DNA, 122 bp, Homo sapiens
  misc_feature (61)..(62): /note="This region represents a CpG dinucleotide"
  misc_feature (61)..(61): /note="Nucleotide may be methylated to form 5-methylcytosine"
taggagatttgcttagagctgatgacttatgcctttcttgcgagttatgcagttagcaagcgactggggaatcagtcagcaagcagaaagaagctaattgaatccagtgtcttcccctttct

SEQ ID NO: 27101 - DNA, 122 bp, Homo sapiens
  misc_feature (61)..(62): /note="This region represents a CpG dinucleotide"
  misc_feature (61)..(61): /note="Nucleotide may be methylated to form 5-methylcytosine"
agaggaactgcagtttgaatccaggcactctggctccaaacttaacatcgtactagattgcgtctctgaagtcaaagagcaaggaaagaaaactaccctagtgcagttgttgagagtatgac

SEQ ID NO: 27102 - DNA, 122 bp, Homo sapiens
  misc_feature (61)..(62): /note="This region represents a CpG dinucleotide"
  misc_feature (61)..(61): /note="Nucleotide may be methylated to form 5-methylcytosine"
tttttggtttcacagaagccattgccagaggccacgtctctaacctgctgctcaaaactgcgtttgctgcagttttacggaagaatttggtgcattattttctagagtaatttactttccta

SEQ ID NO: 27103 - DNA, 122 bp, Homo sapiens
  misc_feature (61)..(62): /note="This region represents a CpG dinucleotide"
  misc_feature (61)..(61): /note="Nucleotide may be methylated to form 5-methylcytosine"
aaatgtggttagggctctctctgaagcagacagcatcgggctacagaacattttctcaaacgctgcatgctggctgctcagagcggagcagttgtaggggaagtgtaagtgtgtatatcaca

SEQ ID NO: 27104 - DNA, 122 bp, Homo sapiens
  misc_feature (61)..(62): /note="This region represents a CpG dinucleotide"
  misc_feature (61)..(61): /note="Nucleotide may be methylated to form 5-methylcytosine"
tgatcacacagacattaaagaggatgatgtccaagctttaactagatttttctgactttacgcaccttcctgataacagccagcttgcataaataccacttatgaggaacaaacaggatttt

SEQ ID NO: 27105 - DNA, 122 bp, Homo sapiens
  misc_feature (61)..(62): /note="This region represents a CpG dinucleotide"
  misc_feature (61)..(61): /note="Nucleotide may be methylated to form 5-methylcytosine"
gtctcagaaagtgcgggtggctgcgtcgaacggtggtggctcagaggaagagattggggccggcagcgacctaggtacctcactctgggtgggacccagaggttgtaacgttgtctatatat

SEQ ID NO: 27106 - DNA, 122 bp, Homo sapiens
  misc_feature (61)..(62): /note="This region represents a CpG dinucleotide"
  misc_feature (61)..(61): /note="Nucleotide may be methylated to form 5-methylcytosine"
tgagtggtttaactcaccctttcatatacctctcaaaatgatttcttgttcttaaaattacgaataaacaaaactgaagtgagaagatgagcttcagaaaaatgggaactgatcattaaact

SEQ ID NO: 27107 - DNA, 122 bp, Homo sapiens
  misc_feature (61)..(62): /note="This region represents a CpG dinucleotide"
  misc_feature (61)..(61): /note="Nucleotide may be methylated to form 5-methylcytosine"
attttccttggtgagatgaatcaccattgactgattcatctccatctcagggcggaagctcggtctagtggttcaagctgtgaggtgtgagtcagttgttctagttctattccctttttggc

SEQ ID NO: 27108 - DNA, 122 bp, Homo sapiens
  misc_feature (61)..(62): /note="This region represents a CpG dinucleotide"
  misc_feature (61)..(61): /note="Nucleotide may be methylated to form 5-methylcytosine"
gctgcctgggtttacaatttataaaatgctttcacaactatgacctcatttgacttccaccgtcaccctgacaggcaggtacggcagacctgactgtcatctcatagacaacgaaactcagg

SEQ ID NO: 27109 - DNA, 122 bp, Homo sapiens
  misc_feature (61)..(62): /note="This region represents a CpG dinucleotide"
  misc_feature (61)..(61): /note="Nucleotide may be methylated to form 5-methylcytosine"
gaacatgctatagttttaaaagaggtctctgttttaataaataaacagatcatacttccccgaagcaaataagagaaaataaaaattccttagcagggtgtattaggacatttatattctgg

SEQ ID NO: 27110 - DNA, 122 bp, Homo sapiens
  misc_feature (61)..(62): /note="This region represents a CpG dinucleotide"
  misc_feature (61)..(61): /note="Nucleotide may be methylated to form 5-methylcytosine"
cagtcaatttttttcttctgaggaggcaagaattgaggttgcttcagacttgtacacattcgctgccggtaactcagatacccatcactgaaaacagaaccgggttggctcctgtgggtcat

SEQ ID NO: 27111 - DNA, 122 bp, Homo sapiens
  misc_feature (61)..(62): /note="This region represents a CpG dinucleotide"
  misc_feature (61)..(61): /note="Nucleotide may be methylated to form 5-methylcytosine"
tttaggttgtgagcagttgcagtaggttacatcaccaggcagatgtttcctgctctgtcccgcatgttcaaaggaggatatttttgatgggaaagtgctgagacacatggtaaattgcgcct

SEQ ID NO: 27112 - DNA, 122 bp, Homo sapiens
  misc_feature (61)..(62): /note="This region represents a CpG dinucleotide"
  misc_feature (61)..(61): /note="Nucleotide may be methylated to form 5-methylcytosine"
tttgggaaggcatgtactgggtttttcttcattcactcaacaaatatttattaagtgccacgatgtgccaagtactgccctgggcacttggaaaaaccacaatgaacaaaacacaaaagtcc

SEQ ID NO: 27113 - DNA, 122 bp, Homo sapiens
  misc_feature (61)..(62): /note="This region represents a CpG dinucleotide"
  misc_feature (61)..(61): /note="Nucleotide may be methylated to form 5-methylcytosine"
ctcatattatgactaatttcagacgcgttaaatccctctatcttgagacttgtgtacttgcgtgtacaagacaggtaacagtcttattatttctgagagatctctcaagtactttcagatcg

SEQ ID NO: 27114 - DNA, 122 bp, Homo sapiens
  misc_feature (61)..(62): /note="This region represents a CpG dinucleotide"
  misc_feature (61)..(61): /note="Nucleotide may be methylated to form 5-methylcytosine"
cagccattctgcatgtttacagacattctggctgtctatcctgggcacaaggtcagactgcgtttcctaaccactcaagtaatgtgtggccatgtaactagctttgaccaataaaatgtgag

SEQ ID NO: 27115 - DNA, 122 bp, Homo sapiens
  misc_feature (61)..(62): /note="This region represents a CpG dinucleotide"
  misc_feature (61)..(61): /note="Nucleotide may be methylated to form 5-methylcytosine"
gaatgcttatttcatataggctaagtagagagtattcagcctgtcagaaaaggaagctttcggcctgatgccaaagaaatttgctagtcaaaataaccagtcaaataatttccaaattaatt

SEQ ID NO: 27116 - DNA, 122 bp, Homo sapiens
  misc_feature (61)..(62): /note="This region represents a CpG dinucleotide"
  misc_feature (61)..(61): /note="Nucleotide may be methylated to form 5-methylcytosine"
tgagtctgaatggagtctggagagagcaatgtctccatggagcgggtgcctggctgtggtcgcttaggcaggagcttcctcctcagtgctgacaacagagaagaacattctgttgtggccag

SEQ ID NO: 27117 - DNA, 122 bp, Homo sapiens
  misc_feature (61)..(62): /note="This region represents a CpG dinucleotide"
  misc_feature (61)..(61): /note="Nucleotide may be methylated to form 5-methylcytosine"
atagctataaatggctgggacacactggaatccaattctagcactctttatcctgctaatcgaacccaaggaataggccccaacccagctcacttatatccttgtgctgtagcctggagcaa

SEQ ID NO: 27118 - DNA, 122 bp, Homo sapiens
  misc_feature (61)..(62): /note="This region represents a CpG dinucleotide"
  misc_feature (61)..(61): /note="Nucleotide may be methylated to form 5-methylcytosine"
cacaatgctggccttctcaaggctggtgtaaatttctacgcagatattaggcagctgagacggcaagcagcagaggaatatcacatcggcccaactcaccagatcagcgttatggtaaaagc

SEQ ID NO: 27119 - DNA, 122 bp, Homo sapiens
  misc_feature (61)..(62): /note="This region represents a CpG dinucleotide"
  misc_feature (61)..(61): /note="Nucleotide may be methylated to form 5-methylcytosine"
gccccaggccaagcactttgtaagtcacttcagtttacttcctatagcaccactatgagacggctattactaaccccatcttacaaataaagaatctgtcttagaggtaatgttacttgtcc

SEQ ID NO: 27120 - DNA, 122 bp, Homo sapiens
  misc_feature (61)..(62): /note="This region represents a CpG dinucleotide"
  misc_feature (61)..(61): /note="Nucleotide may be methylated to form 5-methylcytosine"
tgcattctgcacgggcattgactatcttgacccacactctctatatcatgttcacagtaacgtaagtggtcagatttctacaattaggccttgcaagataataatgacaagccgtattcgta

SEQ ID NO: 27121 - DNA, 122 bp, Homo sapiens
  misc_feature (61)..(62): /note="This region represents a CpG dinucleotide"
  misc_feature (61)..(61): /note="Nucleotide may be methylated to form 5-methylcytosine"
gggcccaggcgcaataggaaactggttaggttgggctttgatccacacattctcctgcatcgaatcccccttttctccccaatctcttctaaagaaagactgaaaactcgctccaagaaaag

SEQ ID NO: 27122 - DNA, 122 bp, Homo sapiens
  misc_feature (61)..(62): /note="This region represents a CpG dinucleotide"
  misc_feature (61)..(61): /note="Nucleotide may be methylated to form 5-methylcytosine"
gcttagtacaaggaagtggttagtttgctgtggaggagctaagcatgaagacggagacaacgagagacagagatcagccagacccatgctgtagaaagaagaggatcatgctgagatgttac

SEQ ID NO: 27123 - DNA, 122 bp, Homo sapiens
  misc_feature (61)..(62): /note="This region represents a CpG dinucleotide"
  misc_feature (61)..(61): /note="Nucleotide may be methylated to form 5-methylcytosine"
actcattgctgacagagtaatatccgcattctttagcctggcattcatgcaagggcatagcgaagagaggacataggtccatggatgcaagtttatgaaagtgccacaaagatgccagccaa

SEQ ID NO: 27124 - DNA, 122 bp, Homo sapiens
  misc_feature (61)..(62): /note="This region represents a CpG dinucleotide"
  misc_feature (61)..(61): /note="Nucleotide may be methylated to form 5-methylcytosine"
ccccatgacacagtttgactcatcactgcccttcttaaagtaggtagtgtgggaaaaatacgtggaaaggaatgtaggatttatagtcaaagtcttattcctaagtctggatattcatcttt

SEQ ID NO: 27125 - DNA, 122 bp, Homo sapiens
  misc_feature (61)..(62): /note="This region represents a CpG dinucleotide"
  misc_feature (61)..(61): /note="Nucleotide may be methylated to form 5-methylcytosine"
gaggattccatacaacctaagtggtgacatcagcacaggctcattactaatctcatgtcacgaggtttcaggcctggctgagaactctgtgagctctgtgatgttgagcttcaggcacatag

SEQ ID NO: 27126 - DNA, 122 bp, Homo sapiens
  misc_feature (61)..(62): /note="This region represents a CpG dinucleotide"
  misc_feature (61)..(61): /note="Nucleotide may be methylated to form 5-methylcytosine"
cctctcaccactttctggtctctgtggtttctgctgtgaagccagctgttaagcttgtggcggatctcttatgcctaatgagggcagcatttttctctcatagttttcagtattctctcttt

SEQ ID NO: 27127 - DNA, 122 bp, Homo sapiens
  misc_feature (61)..(62): /note="This region represents a CpG dinucleotide"
  misc_feature (61)..(61): /note="Nucleotide may be methylated to form 5-methylcytosine"
taacattcaataaatggtgtcatgtactagtcattctacaacttgcttttctaacccttacgtttttgaattttacctttgctggaaatataactctagttcattaattccaatttaattca

SEQ ID NO: 27128 - DNA, 122 bp, Homo sapiens
  misc_feature (61)..(62): /note="This region represents a CpG dinucleotide"
  misc_feature (61)..(61): /note="Nucleotide may be methylated to form 5-methylcytosine"
ccgcaccctcaccacagttccatttgtacatccaggaagcccagtttgaaaaacaaaccacgcctgtaaactgagttggatgaaaagagctgccttgggggtgggaggctaaggaactgttc

SEQ ID NO: 27129 - DNA, 122 bp, Homo sapiens
  misc_feature (61)..(62): /note="This region represents a CpG dinucleotide"
  misc_feature (61)..(61): /note="Nucleotide may be methylated to form 5-methylcytosine"
ggtctggtgtttgaagacagcttgaccttggatgagatcatgcctatgtcaggtcacccacgctccatgcacctgactcatcagtgttagttcaaatagagcattggttagaaatcacccac

SEQ ID NO: 27130 - DNA, 122 bp, Homo sapiens
  misc_feature (61)..(62): /note="This region represents a CpG dinucleotide"
  misc_feature (61)..(61): /note="Nucleotide may be methylated to form 5-methylcytosine"
gggcctgggccttcttggcaagtgggaaacccaatcttttggctgcctgcctcttcctgccgcagaagagcgacttatggatgctgagagcagccactgagagggaagcttagggctccatg

SEQ ID NO: 27131 - DNA, 122 bp, Homo sapiens
  misc_feature (61)..(62): /note="This region represents a CpG dinucleotide"
  misc_feature (61)..(61): /note="Nucleotide may be methylated to form 5-methylcytosine"
gattagagaatttgccagttctagctctgtcactcaattatccctatcattctgttaaaacgtgtgtgactttgggtaatttagtctgcaggctctcagaagacaagttttctaaaatgtaa

SEQ ID NO: 27132 - DNA, 122 bp, Homo sapiens
  misc_feature (61)..(62): /note="This region represents a CpG dinucleotide"
  misc_feature (61)..(61): /note="Nucleotide may be methylated to form 5-methylcytosine"
catcacccaggctggcctcttggccagcaggcggagagataagaacgttgctctggggaacgagttccccagcagtaactgcagtctctgtttggaatatgagttgttccatgctaatgagt

SEQ ID NO: 27133 - DNA, 122 bp, Homo sapiens
  misc_feature (61)..(62): /note="This region represents a CpG dinucleotide"
  misc_feature (61)..(61): /note="Nucleotide may be methylated to form 5-methylcytosine"
aaagaatgcagcagaagcagacacacctttacactcggggtgagtagtcggagagcaccacgtgatagagcagccagcgggaagagccaacaggtcaaccgggtccagggagctaagaaaac

SEQ ID NO: 27134 - DNA, 122 bp, Homo sapiens
  misc_feature (61)..(62): /note="This region represents a CpG dinucleotide"
  misc_feature (61)..(61): /note="Nucleotide may be methylated to form 5-methylcytosine"
agaacctgcagcttctaatatgaacatcaaatgaccccaactcattccctgtgagggctccgtgtgtgatctcatccccatgcctcctctgcactgtcatcttggtttctgtctctccttct

SEQ ID NO: 27135 - DNA, 122 bp, Homo sapiens
  misc_feature (61)..(62): /note="This region represents a CpG dinucleotide"
  misc_feature (61)..(61): /note="Nucleotide may be methylated to form 5-methylcytosine"
agccaggaccacatacactcttgggggccctgctgagactgcaagagtcatgaattctaacgttccacaggtgaaagattccaagattctaggattgcaaaaccccatcattctaagattcc

SEQ ID NO: 27136 - DNA, 122 bp, Homo sapiens
  misc_feature (61)..(62): /note="This region represents a CpG dinucleotide"
  misc_feature (61)..(61): /note="Nucleotide may be methylated to form 5-methylcytosine"
cgggaagggctccgtgcccagtagaggtgcagtgcagcagccagctcgcagcagtgctcccgtagagctgatggcattggcaggagtggcggctcagcacagggaagttctccagtgcccag

SEQ ID NO: 27137 - DNA, 122 bp, Homo sapiens
  misc_feature (61)..(62): /note="This region represents a CpG dinucleotide"
  misc_feature (61)..(61): /note="Nucleotide may be methylated to form 5-methylcytosine"
gtgactccccacggagtcaccatccagcagccgctcaagtgcagtcagtcccacttcacacgtgtaacccatttaccaacctcactgtgcagctgcatcaccgttcaccacctcagctgccc

SEQ ID NO: 27138 - DNA, 122 bp, Homo sapiens
  misc_feature (61)..(62): /note="This region represents a CpG dinucleotide"
  misc_feature (61)..(61): /note="Nucleotide may be methylated to form 5-methylcytosine"
tatgtaggcttagagcacaggagaaaggtcttaaaaccctgggcttatgggacgttaccacggagactgcacagagtgagaagatccattttaaagctgatgatgaataatattttcgttat

SEQ ID NO: 27139 - DNA, 122 bp, Homo sapiens
  misc_feature (61)..(62): /note="This region represents a CpG dinucleotide"
  misc_feature (61)..(61): /note="Nucleotide may be methylated to form 5-methylcytosine"
ttgggttttaggtgttaaaaatagaccaacaaggcatgatgttttagatgactcatgtgacggctttaaggacctcatcaaacctcatgaggaattgaagaaaagtgggagaggcaaaaagg

SEQ ID NO: 27140 - DNA, 122 bp, Homo sapiens
  misc_feature (61)..(62): /note="This region represents a CpG dinucleotide"
  misc_feature (61)..(61): /note="Nucleotide may be methylated to form 5-methylcytosine"
tagtatccagacacccactagaatggctagaatgaaacaccaccaagggttggccaaacgcggaacaaccgaacttccgcacactgctggtgagagtgtaattgtttaactgccctggacaa

SEQ ID NO: 27141 - DNA, 122 bp, Homo sapiens
  misc_feature (61)..(62): /note="This region represents a CpG dinucleotide"
  misc_feature (61)..(61): /note="Nucleotide may be methylated to form 5-methylcytosine"
ttagaatcaaaatcaacgtttgttactacacagggttgagcattccaggcacactctggtcgttttgttattctaatgtccacttatttcatgtctgccgtgaccgtgacagttttcagtca

SEQ ID NO: 27142 - DNA, 122 bp, Homo sapiens
  misc_feature (61)..(62): /note="This region represents a CpG dinucleotide"
  misc_feature (61)..(61): /note="Nucleotide may be methylated to form 5-methylcytosine"
caacattacgctaagcatttagtagcccctacattgcaaacaaatcttttgaagattccccgtgaagagtgtaaatgaatcactttcaactattggccttatataactgactcatattctgc

SEQ ID NO: 27143 - DNA, 122 bp, Homo sapiens
  misc_feature (61)..(62): /note="This region represents a CpG dinucleotide"
  misc_feature (61)..(61): /note="Nucleotide may be methylated to form 5-methylcytosine"
acaaagaaaaaccacgcactatctggacctccacagaacatttgctggaccttcacagaacgtttgctgattcacagaatgcagcagatcagcctagtggaacagaaagaagggatactcag

SEQ ID NO: 27144 - DNA, 122 bp, Homo sapiens
  misc_feature (61)..(62): /note="This region represents a CpG dinucleotide"
  misc_feature (61)..(61): /note="Nucleotide may be methylated to form 5-methylcytosine"
ccaccagcttccctcagtttagatggagaggtgcctaccctctgaccagcaaatgtcctccgaggaaacggagaaatgggtcttgagaggctttggaaggggggacaaaatctctagggaga

SEQ ID NO: 27145 - DNA, 122 bp, Homo sapiens
  misc_feature (61)..(62): /note="This region represents a CpG dinucleotide"
  misc_feature (61)..(61): /note="Nucleotide may be methylated to form 5-methylcytosine"
ctctggaatgcataaagcatgatttcagaacatgttctaattctaagacccttctcttcccggcagtttaaaaaaaacaaaaaacaaaacgtcgtatctttgagcattggttttcaaacatc

SEQ ID NO: 27146 - DNA, 122 bp, Homo sapiens
  misc_feature (61)..(62): /note="This region represents a CpG dinucleotide"
  misc_feature (61)..(61): /note="Nucleotide may be methylated to form 5-methylcytosine"
gtccaattaaacctctttttcttcccagtctgaggtatgtctttatcagcagtgtgaaaacggactaatacagtgcacaaagagggaaaatatatttgtaaggtatttggccaaaaaagcat

SEQ ID NO: 27147 - DNA, 122 bp, Homo sapiens
  misc_feature (61)..(62): /note="This region represents a CpG dinucleotide"
  misc_feature (61)..(61): /note="Nucleotide may be methylated to form 5-methylcytosine"
cctagtttgcccaattcccactgcagtccattggtttatgcctctatgccttcagatttacggtctggtattgctggttatcttctcaagagaacatgacatctcaacaatagtacatatag

SEQ ID NO: 27148 - DNA, 122 bp, Homo sapiens
  misc_feature (61)..(62): /note="This region represents a CpG dinucleotide"
  misc_feature (61)..(61): /note="Nucleotide may be methylated to form 5-methylcytosine"
cagtcctctccccaccggacttcctataaacctgggttggcaaagcatcaacatgtaagtcgccaccacttccttcctcttgggcagccaccacgaactcacctgacaggctgtgtctgaac

SEQ ID NO: 27149 - DNA, 122 bp, Homo sapiens
  misc_feature (61)..(62): /note="This region represents a CpG dinucleotide"
  misc_feature (61)..(61): /note="Nucleotide may be methylated to form 5-methylcytosine"
taatcacttcgctcataaacattcactgctctgtgggagtcctccccataggttgtcttacggatgcatcagcataagaaatgtttgatggggcctgcaatttgcttgtcattttctgccca

SEQ ID NO: 27150 - DNA, 122 bp, Homo sapiens
  misc_feature (61)..(62): /note="This region represents a CpG dinucleotide"
  misc_feature (61)..(61): /note="Nucleotide may be methylated to form 5-methylcytosine"
ctctatgcctttacccaatcagttttgaaaacatattttattttcttttttttctccatgcgtgacctgctattgtcaatggccatttggaattcccaaaggattggtagaggtatgcagtt

SEQ ID NO: 27151 - DNA, 122 bp, Homo sapiens
  misc_feature (61)..(62): /note="This region represents a CpG dinucleotide"
  misc_feature (61)..(61): /note="Nucleotide may be methylated to form 5-methylcytosine"
atttctggacagaaaagctggtaataacctcctcacttttttcctgtgaacccagaattgcgaatggagggagtaaaaaagcgtaatcttggagcagggggctgcaaacagaggtctgaatg

SEQ ID NO: 27152 - DNA, 122 bp, Homo sapiens
  misc_feature (61)..(62): /note="This region represents a CpG dinucleotide"
  misc_feature (61)..(61): /note="Nucleotide may be methylated to form 5-methylcytosine"
ataccacaggtcttctgtggagtagaaacactggtgatgtctcccagtctttttccaactcggagtcactcaaaatagataacatgtagcagtagttattaaaaagttttattccctttagt

SEQ ID NO: 27153 - DNA, 122 bp, Homo sapiens
  misc_feature (61)..(62): /note="This region represents a CpG dinucleotide"
  misc_feature (61)..(61): /note="Nucleotide may be methylated to form 5-methylcytosine"
ggtttccttctcttttctctgctacaaagaaattttgcttttagctttctttttgcatcacgttacgttctgtaagaccaggagaaagagagaggtttatcctacccctcccccaagggcag

SEQ ID NO: 27154 - DNA, 122 bp, Homo sapiens
  misc_feature (61)..(62): /note="This region represents a CpG dinucleotide"
  misc_feature (61)..(61): /note="Nucleotide may be methylated to form 5-methylcytosine"
cctgtgctcctccagtcacccctggtgacttcctgttttgatttcactttctgggtgggccgtaccctttgagatgacagacaggagtcccagcagctgctggttcaaggatgctgcatctt

SEQ ID NO: 27155 - DNA, 122 bp, Homo sapiens
  misc_feature (61)..(62): /note="This region represents a CpG dinucleotide"
  misc_feature (61)..(61): /note="Nucleotide may be methylated to form 5-methylcytosine"
caagaattatgcaaactttagccaccatttactctgtctcaggtatgatgcaatgcctttcgtaatttatcatctcatttagttctcacaacgaagtaatatgatatgtttcctgccaacat

SEQ ID NO: 27156 - DNA, 122 bp, Homo sapiens
  misc_feature (61)..(62): /note="This region represents a CpG dinucleotide"
  misc_feature (61)..(61): /note="Nucleotide may be methylated to form 5-methylcytosine"
aacttaatactattggctgacctgtaccttcaactgagctgggtgagtaatatttaaatgcggagcctgacagctcataacccacggcggcttactccccctgtggcaagctgctgagccag

SEQ ID NO: 27157 - DNA, 122 bp, Homo sapiens
  misc_feature (61)..(62): /note="This region represents a CpG dinucleotide"
  misc_feature (61)..(61): /note="Nucleotide may be methylated to form 5-methylcytosine"
cattgtgcaaacatcagagagtgtactaacacaaacctagatggtatagcctactacacacgacagcctgtcactgtattgaatactgtgggaattgtaagacaatggtaaccatttgtgta

SEQ ID NO: 27158 - DNA, 122 bp, Homo sapiens
  misc_feature (61)..(62): /note="This region represents a CpG dinucleotide"
  misc_feature (61)..(61): /note="Nucleotide may be methylated to form 5-methylcytosine"
ctgagcttagaaaagcatgcccattctaaacatgttttttggagttatgaagtgtttatgcggggacatcaagagatacatcttagccatgaagctcaaaaattagcaagaatcctgacaag

SEQ ID NO: 27159 - DNA, 122 bp, Homo sapiens
  misc_feature (61)..(62): /note="This region represents a CpG dinucleotide"
  misc_feature (61)..(61): /note="Nucleotide may be methylated to form 5-methylcytosine"
actgcccctccccttcctgcctgcccttcttccggggcacccagcagctcggtcctagggcgatgttgacagacagacagaggggcggatgcagcctacctcctgggcagtgagctgcggtc

SEQ ID NO: 27160 - DNA, 122 bp, Homo sapiens
  misc_feature (61)..(62): /note="This region represents a CpG dinucleotide"
  misc_feature (61)..(61): /note="Nucleotide may be methylated to form 5-methylcytosine"
gcaaagcaaatacataggattgaccaaaccaaagctttgcaggcagtggaggttctgatacgagctgtaccctgcagttcatgcatatcacttgaagagtgaggttatgactcacaagtggg

SEQ ID NO: 27161 - DNA, 122 bp, Homo sapiens
  misc_feature (61)..(62): /note="This region represents a CpG dinucleotide"
  misc_feature (61)..(61): /note="Nucleotide may be methylated to form 5-methylcytosine"
ctcaaaggtgaagaaaggccagatatgcctgttggaagcaggtatccctggaacctgcagcggggcagctcaggaggtggcttacacttacttaagcaagtgacttacatttacttaagcaa

SEQ ID NO: 27162 - DNA, 122 bp, Homo sapiens
  misc_feature (61)..(62): /note="This region represents a CpG dinucleotide"
  misc_feature (61)..(61): /note="Nucleotide may be methylated to form 5-methylcytosine"
tctcttcaataatcttgcaatcaggaagcctgcccctctagaaccacaaaactgctgccgcgaacaggaaaccactacaatcaggaagccgctactgctgccgggctccagaaccagtgcac

SEQ ID NO: 27163 - DNA, 122 bp, Homo sapiens
  misc_feature (61)..(62): /note="This region represents a CpG dinucleotide"
  misc_feature (61)..(61): /note="Nucleotide may be methylated to form 5-methylcytosine"
taatgataacttcttttcatatctgatgcttgtcatgtgtgtcttctatttttgctttgacgtaagttttcatttgtataaatacctggggcatagttgctggattatatggtaagactgtt

SEQ ID NO: 27164 - DNA, 122 bp, Homo sapiens
  misc_feature (61)..(62): /note="This region represents a CpG dinucleotide"
  misc_feature (61)..(61): /note="Nucleotide may be methylated to form 5-methylcytosine"
ccctccgcccccacggctttgccccaacccctcaaaccagctcctcaggctcagggtgaccggctctgccaggacccaccagccaattccaagtcgagcaaaagaatccagcctggcagcac

SEQ ID NO: 27165 - DNA, 122 bp, Homo sapiens
  misc_feature (61)..(62): /note="This region represents a CpG dinucleotide"
  misc_feature (61)..(61): /note="Nucleotide may be methylated to form 5-methylcytosine"
ctctgagctgcttttctgggcacactgcctgtagggtagtcctggtcttaaggagcagtacgtctgctgctgtacactgctgcttcaatacaaattgctgtttaacccacctgtttaacacc

SEQ ID NO: 27166 - DNA, 122 bp, Homo sapiens
  misc_feature (61)..(62): /note="This region represents a CpG dinucleotide"
  misc_feature (61)..(61): /note="Nucleotide may be methylated to form 5-methylcytosine"
gacttgaaaaacgccctattatttagactgacctaattcaaagttctttgcagcttacctcgtgctaatcactggcaagtggtctccagctgctctttggttttggttgtttcacgtccttg

SEQ ID NO: 27167 - DNA, 122 bp, Homo sapiens
  misc_feature (61)..(62): /note="This region represents a CpG dinucleotide"
  misc_feature (61)..(61): /note="Nucleotide may be methylated to form 5-methylcytosine"
tcggctcctcggaggacctgtccagtgactcggagagtcatctcccagaagagccagctccgctgtcgccccagcaggccttcaggaggcgagcaaacaccctgagtcacttccccatcgaa

SEQ ID NO: 27168 - DNA, 122 bp, Homo sapiens
  misc_feature (61)..(62): /note="This region represents a CpG dinucleotide"
  misc_feature (61)..(61): /note="Nucleotide may be methylated to form 5-methylcytosine"
taccttgttttcttttttcagcatttatgtatctttttaaaagcgtgccacacacatctgcgtacagtcacaggcttatgatcagcagagatctctaggatgaaactatttaaatctgaaaa

SEQ ID NO: 27169 - DNA, 122 bp, Homo sapiens
  misc_feature (61)..(62): /note="This region represents a CpG dinucleotide"
  misc_feature (61)..(61): /note="Nucleotide may be methylated to form 5-methylcytosine"
ggagattattattcatttcacagaagacattggcattcgatacccttaaatagcaatctccgttagtacatttaagagaggattcagtttacagaagtgtgatttatacaaaaccacatctg

SEQ ID NO: 27170 - DNA, 122 bp, Homo sapiens
  misc_feature (61)..(62): /note="This region represents a CpG dinucleotide"
  misc_feature (61)..(61): /note="Nucleotide may be methylated to form 5-methylcytosine"
atatttttctgtttctttgacatctgcaaaggttcttaggtctagtttagtgagacagaacgcaagaacagtaagtcaggcaaagcagatgtatgactcatagataggcagcaagaataaac

SEQ ID NO: 27171 - DNA, 122 bp, Homo sapiens
  misc_feature (61)..(62): /note="This region represents a CpG dinucleotide"
  misc_feature (61)..(61): /note="Nucleotide may be methylated to form 5-methylcytosine"
ggaagggagaaggccaccatttctgtttatgtcctgtttccaccttatcagcagcctagacgccaacaatgagccctgtgggacaggcctcacccattccctgctccggacatttgtccagc

SEQ ID NO: 27172 - DNA, 122 bp, Homo sapiens
  misc_feature (61)..(62): /note="This region represents a CpG dinucleotide"
  misc_feature (61)..(61): /note="Nucleotide may be methylated to form 5-methylcytosine"
acaaacaaaaggtgtccactccttttctccaggctcttaacatgcttgtaagattctttacgtcttagctttccctgaactgccttctacatgtttttgaaagtgaaaaaaaaactgaaagg

SEQ ID NO: 27173 - DNA, 122 bp, Homo sapiens
  misc_feature (61)..(62): /note="This region represents a CpG dinucleotide"
  misc_feature (61)..(61): /note="Nucleotide may be methylated to form 5-methylcytosine"
aaaggactgcaaacaacacaaatgtcattaatttagggactggttgagtaagtgatgctacgtccacagtggagcactatgcagctgcaaaaggaaagaataagacctgtatatactcctgt

SEQ ID NO: 27174 - DNA, 122 bp, Homo sapiens
  misc_feature (61)..(62): /note="This region represents a CpG dinucleotide"
  misc_feature (61)..(61): /note="Nucleotide may be methylated to form 5-methylcytosine"
agctcagctctgactcaaaagtttttccatttaccatcaacatggaaacttggctcctcacgtaggtatattatcccccttttgtacatggtcttgttgatccaaactccctttctgtgaaa

SEQ ID NO: 27175 - DNA, 122 bp, Homo sapiens
  misc_feature (61)..(62): /note="This region represents a CpG dinucleotide"
  misc_feature (61)..(61): /note="Nucleotide may be methylated to form 5-methylcytosine"
aactggcgtttccggatggccttcggataatgtcagtttactcatgtcatctattgttcccgtggatgtgttgagacctgaggcatcgctgaaactgtggtcaaaggcagcttcgcttatat

SEQ ID NO: 27176 - DNA, 122 bp, Homo sapiens
  misc_feature (61)..(62): /note="This region represents a CpG dinucleotide"
  misc_feature (61)..(61): /note="Nucleotide may be methylated to form 5-methylcytosine"
gactctcctagtaaaacctcagaaacagaagcttgagaaggaacatgactcaacagaaaacgctcaccaggaactgagactcctagcctcaatcagagtgtctggagaagcacattgtccct

SEQ ID NO: 27177 - DNA, 122 bp, Homo sapiens
  misc_feature (61)..(62): /note="This region represents a CpG dinucleotide"
  misc_feature (61)..(61): /note="Nucleotide may be methylated to form 5-methylcytosine"
cttggaagctgccttctcttgtttgcatatgttttacagtgtcctaaccgctttggagagcgataacttgagttaaagcacctgtctgtgcctggcctccagcagatcttggtccagtgtga

SEQ ID NO: 27178 - DNA, 122 bp, Homo sapiens
  misc_feature (61)..(62): /note="This region represents a CpG dinucleotide"
  misc_feature (61)..(61): /note="Nucleotide may be methylated to form 5-methylcytosine"
gtgggctggcagtgtgcttcctgcacccagcgccagcccgccctggggaggggctgaacccgccctgctcgtgataaggcacaagcaagggctgccctgaaggaagctccaaagagaaagga

SEQ ID NO: 27179 - DNA, 122 bp, Homo sapiens
  misc_feature (61)..(62): /note="This region represents a CpG dinucleotide"
  misc_feature (61)..(61): /note="Nucleotide may be methylated to form 5-methylcytosine"
gggagacgggcccacagcgtgtgtcttctgaagcagccatctgtgaagttgccaggacatcgtagcctggggctgggcacacacatgggtgcacatgcaagggagaaggggctcaaagacac

SEQ ID NO: 27180 - DNA, 122 bp, Homo sapiens
  misc_feature (61)..(62): /note="This region represents a CpG dinucleotide"
  misc_feature (61)..(61): /note="Nucleotide may be methylated to form 5-methylcytosine"
gaggagaggcaaattatctcaacacaccagaacttaggccctttacctgtttgatgagatcgtagaatccatcctgcgagtcacagaggacagtagggaagatcaaatgaagtcatgtaaat

SEQ ID NO: 27181 - DNA, 122 bp, Homo sapiens
  misc_feature (61)..(62): /note="This region represents a CpG dinucleotide"
  misc_feature (61)..(61): /note="Nucleotide may be methylated to form 5-methylcytosine"
caagttgccaaatgagcagtataagaatactttagggctacatatgtttaaaagaatgagcgatagttgttagacagaggtgatcagaaacacttattgttgttttagaggaagtgaaacct

SEQ ID NO: 27182 - DNA, 122 bp, Homo sapiens
  misc_feature (61)..(62): /note="This region represents a CpG dinucleotide"
  misc_feature (61)..(61): /note="Nucleotide may be methylated to form 5-methylcytosine"
tcattatagctattccttttcctagcttctctatttttgccaatgtaacttttccatccccgtgactaagagatgaataagagatgtaagaggaagagctggtttggcgcagagcacagtga

SEQ ID NO: 27183 - DNA, 122 bp, Homo sapiens
  misc_feature (61)..(62): /note="This region represents a CpG dinucleotide"
  misc_feature (61)..(61): /note="Nucleotide may be methylated to form 5-methylcytosine"
acatgaggatgagtcagtgtcaagactcccagtggggccatcggatcattactgcatgatcgtcttaagcctttgttagtgaatccctcagactcacgccttcttctctccaggcctgaaca

SEQ ID NO: 27184 - DNA, 122 bp, Homo sapiens
  misc_feature (61)..(62): /note="This region represents a CpG dinucleotide"
  misc_feature (61)..(61): /note="Nucleotide may be methylated to form 5-methylcytosine"
gcagtgtgcttttccataggtctatgtgaaacaggtttttcatctagaactaccttcttccgcttggagcttagttttcccctgaattctctaggctaaactcatttgtgttcagttttgct

SEQ ID NO: 27185 - DNA, 122 bp, Homo sapiens
  misc_feature (61)..(62): /note="This region represents a CpG dinucleotide"
  misc_feature (61)..(61): /note="Nucleotide may be methylated to form 5-methylcytosine"
agcattttctttcaatttagtcagcttcctgtttttcatgcaaattggtctggagagagccgttttaagtagataaaacaaattcgcaaaaattgtattacttgtattatcaccttccccag

SEQ ID NO: 27186 - DNA, 122 bp, Homo sapiens
  misc_feature (61)..(62): /note="This region represents a CpG dinucleotide"
  misc_feature (61)..(61): /note="Nucleotide may be methylated to form 5-methylcytosine"
tcagctgcatcctgggatgagaaaacacatgggacagagccatagcagactcatagcctacgtgtatcatgagcaagaaatacattgatgacgtaacaactgagattttgggggattgtttg

SEQ ID NO: 27187 - DNA, 122 bp, Homo sapiens
  misc_feature (61)..(62): /note="This region represents a CpG dinucleotide"
  misc_feature (61)..(61): /note="Nucleotide may be methylated to form 5-methylcytosine"
gtgaagtatcacatcagaaactagctcagatcaaagggcgtgtgacaactgaggctagaacgctcactgccttagcccagccatagcaccttcggagagcagggctgtctgcacgggacata

SEQ ID NO: 27188 - DNA, 122 bp, Homo sapiens
  misc_feature (61)..(62): /note="This region represents a CpG dinucleotide"
  misc_feature (61)..(61): /note="Nucleotide may be methylated to form 5-methylcytosine"
cctgggtcctccgcagaatgccgagtccctttctgccctgtccaatcatgctctgatacccgaccagacatgcgtgtgcaaccctcactatcaggagaacgtgtctgtgaagctgaggaacg

SEQ ID NO: 27189 - DNA, 122 bp, Homo sapiens
  misc_feature (61)..(62): /note="This region represents a CpG dinucleotide"
  misc_feature (61)..(61): /note="Nucleotide may be methylated to form 5-methylcytosine"
tcagacacaatctaacccaatgagtcaaagcaacagagtggtgacagaggaaaagcctatcgagtgcacagatctctcagcaagagcaggcccaggaagtcagaaaagctgagtggtgggaa

SEQ ID NO: 27190 - DNA, 122 bp, Homo sapiens
  misc_feature (61)..(62): /note="This region represents a CpG dinucleotide"
  misc_feature (61)..(61): /note="Nucleotide may be methylated to form 5-methylcytosine"
gccctgggaagaagaaagcagtgcttccacgagcccctcctcagatgcagcctcagcttgcgtcaggggaacgcctggtttccaggggccccatgttgccctctcacttttgcacagcctgc

SEQ ID NO: 27191 - DNA, 122 bp, Homo sapiens
  misc_feature (61)..(62): /note="This region represents a CpG dinucleotide"
  misc_feature (61)..(61): /note="Nucleotide may be methylated to form 5-methylcytosine"
caaatatgcagtgagaccttgatcctgtcttaacatttgatctcagacagacaaatgacacgtaaaaacacaaggtcagagtgaattagaggcaggagaatgaaacacactgatacagaatg

SEQ ID NO: 27192 - DNA, 122 bp, Homo sapiens
  misc_feature (61)..(62): /note="This region represents a CpG dinucleotide"
  misc_feature (61)..(61): /note="Nucleotide may be methylated to form 5-methylcytosine"
tttttaaatttttaagattaaaaacttatgtcctcgttttattttcttctgatgagtcagcgaccttaagaatccaaagctctgcacccctggactaaggccaggagtgaaaatccattact

SEQ ID NO: 27193 - DNA, 122 bp, Homo sapiens
  misc_feature (61)..(62): /note="This region represents a CpG dinucleotide"
  misc_feature (61)..(61): /note="Nucleotide may be methylated to form 5-methylcytosine"
aggttagcatgtaattacagcactgtattctaaattgaatagaggtgtggacagagactgcgactaactcttacacactggatagaggctgcagctaactcttacacacccaggagtcacca

SEQ ID NO: 27194 - DNA, 122 bp, Homo sapiens
  misc_feature (61)..(62): /note="This region represents a CpG dinucleotide"
  misc_feature (61)..(61): /note="Nucleotide may be methylated to form 5-methylcytosine"
tttctcctctggcctccagaaaccaccaggaagagaagcaattaggatgagtgaacaaaacgctattttcaactgtcattttttattggtgaaaagaactctggcctgggaatcaggttcag

SEQ ID NO: 27195 - DNA, 122 bp, Homo sapiens
  misc_feature (61)..(62): /note="This region represents a CpG dinucleotide"
  misc_feature (61)..(61): /note="Nucleotide may be methylated to form 5-methylcytosine"
agggttagaaatggcaacactccataaggattagcttgtgggggttaaggaaaggacctacgctcttctgggatgactagcaagttttgaacttgaaaaagggtggtgtcatttatgaaact

SEQ ID NO: 27196 - DNA, 122 bp, Homo sapiens
  misc_feature (61)..(62): /note="This region represents a CpG dinucleotide"
  misc_feature (61)..(61): /note="Nucleotide may be methylated to form 5-methylcytosine"
caagctctcacaggggttatgttactaaagcggttttatagcccttggcttgaaagggcacgggaaaagtaaataagcctctgcttgcttagagcacagccaaagctgattgtatttccctc

SEQ ID NO: 27197 - DNA, 122 bp, Homo sapiens
  misc_feature (61)..(62): /note="This region represents a CpG dinucleotide"
  misc_feature (61)..(61): /note="Nucleotide may be methylated to form 5-methylcytosine"
tgggagggttccctggggtgggctggggtggcggtggccagtcacctctaactgctgtcccgcctgcttgcagacctgctgcggatgttctttgacgcactgtatgacgaggacgtggtgaa

SEQ ID NO: 27198 - DNA, 122 bp, Homo sapiens
  misc_feature (61)..(62): /note="This region represents a CpG dinucleotide"
  misc_feature (61)..(61): /note="Nucleotide may be methylated to form 5-methylcytosine"
gtgggaggacacgtgcctagcatttttacaatatgccttttcttttagccctgaatctaccgtgtcgagggcattcttttgtgtatctggtggctcttaggagtttgggatctaatagtacc

SEQ ID NO: 27199 - DNA, 122 bp, Homo sapiens
  misc_feature (61)..(62): /note="This region represents a CpG dinucleotide"
  misc_feature (61)..(61): /note="Nucleotide may be methylated to form 5-methylcytosine"
ttgtctttgttttaaaccataaactataaactaagttcctcccaaagttagttcagtcaacgcccaggaatgaatgaggacagcttagaggttagaagcaagatagagtaggttaggttaga

SEQ ID NO: 27200 - DNA, 122 bp, Homo sapiens
  misc_feature (61)..(62): /note="This region represents a CpG dinucleotide"
  misc_feature (61)..(61): /note="Nucleotide may be methylated to form 5-methylcytosine"
gacagcggaaagccagagctccctggaggatctggctgagaggcagaaaatggccctcagcgctctcggaacggtccttccagaagaactgatgaaatagctactacgccaggcacgtggca

SEQ ID NO: 27201 - DNA, 122 bp, Homo sapiens
  misc_feature (61)..(62): /note="This region represents a CpG dinucleotide"
  misc_feature (61)..(61): /note="Nucleotide may be methylated to form 5-methylcytosine"
cgatggtctcaggtggtggctggtaataatcatgttgataataatcattgtcccctagtccggaaacagggagaggaggagacagctctggggctgcaagtgacctcgggaaggcaattgac

SEQ ID NO: 27202 - DNA, 122 bp, Homo sapiens
  misc_feature (61)..(62): /note="This region represents a CpG dinucleotide"
  misc_feature (61)..(61): /note="Nucleotide may be methylated to form 5-methylcytosine"
gcacagaagaggccaagccagcagcacttatgtgttgcaatcctgctgcatgacaggcttcgcatccagtgctcctgacctgttttgggtcacagcaggccgaggtcagggccatgtccctg

SEQ ID NO: 27203 - DNA, 122 bp, Homo sapiens
  misc_feature (61)..(62): /note="This region represents a CpG dinucleotide"
  misc_feature (61)..(61): /note="Nucleotide may be methylated to form 5-methylcytosine"
aaattgctaacttctgcaaaaagaggtctagtgatcagaattcagtattagagctcttttcgacttcagactgagagcatatagtccacatttcaggtgtttcttgggtttgttccctgctg

SEQ ID NO: 27204 - DNA, 122 bp, Homo sapiens
  misc_feature (61)..(62): /note="This region represents a CpG dinucleotide"
  misc_feature (61)..(61): /note="Nucleotide may be methylated to form 5-methylcytosine"
tgcgcctggccatgttaagcatttcttaatgtgctgaaataatcactgcctgcttcaaaacgtagctcaaaaaaaatccacatttttcttcagatcctcaaaaaaaagctttaaccctttct

SEQ ID NO: 27205 - DNA, 122 bp, Homo sapiens
  misc_feature (61)..(62): /note="This region represents a CpG dinucleotide"
  misc_feature (61)..(61): /note="Nucleotide may be methylated to form 5-methylcytosine"
aacttctcatcattatctgacccaccaactgtaaagttggatgtacacagcagcaatccacgtggtttatccaagatcaggctcaaccagattttgaagccacaagtaagttgcatgggctt

SEQ ID NO: 27206 - DNA, 122 bp, Homo sapiens
  misc_feature (61)..(62): /note="This region represents a CpG dinucleotide"
  misc_feature (61)..(61): /note="Nucleotide may be methylated to form 5-methylcytosine"
agggtcatatgaagaactccataatgttcttgccaagaaaaaagatgattgagtatataacgaacttcagatacagtgtatagaggatgatgcatttgtggcataataaatagttttcagtg

SEQ ID NO: 27207 - DNA, 122 bp, Homo sapiens
  misc_feature (61)..(62): /note="This region represents a CpG dinucleotide"
  misc_feature (61)..(61): /note="Nucleotide may be methylated to form 5-methylcytosine"
atgtgaagaacgcgtaaggctgtggggatccaggcgatctagattccctggcagcagatacgttggctttctcagctgttgaatttgagtgcccattccaagggtaggcattgattgttatc

SEQ ID NO: 27208 - DNA, 122 bp, Homo sapiens
  misc_feature (61)..(62): /note="This region represents a CpG dinucleotide"
  misc_feature (61)..(61): /note="Nucleotide may be methylated to form 5-methylcytosine"
gtgtccttcctcaccttcctcagtgagattagtcggacttggccaaaccaaaaccagtaacgctgatgagaacagggaactcccagccttagttctattttgtccacccttgattccttctc

SEQ ID NO: 27209 - DNA, 122 bp, Homo sapiens
  misc_feature (61)..(62): /note="This region represents a CpG dinucleotide"
  misc_feature (61)..(61): /note="Nucleotide may be methylated to form 5-methylcytosine"
gccatcattcaagctgttccctcttcttggcatgctcttctctgctcaactcctgccaaacgactcatccgtcaagatccagcttatgtttatgaagttggagaggcctctctggggagact

SEQ ID NO: 27210 - DNA, 122 bp, Homo sapiens
  misc_feature (61)..(62): /note="This region represents a CpG dinucleotide"
  misc_feature (61)..(61): /note="Nucleotide may be methylated to form 5-methylcytosine"
cctttggcacaatctagaagtaagcagagaagggggttaagatgcctttcattatgttaacgtttaatcctgagagtttacataaaaagccagatttctgggtctttgagaaaaatgagatc

SEQ ID NO: 27211 - DNA, 122 bp, Homo sapiens
  misc_feature (61)..(62): /note="This region represents a CpG dinucleotide"
  misc_feature (61)..(61): /note="Nucleotide may be methylated to form 5-methylcytosine"
ctcactggggcactatgaaggttcagcaagcagctgaccatattctgactttatccttagcgtgaaccccatgcacaatcagctcttcataaacatccgtctcctctggccaggcacagtgg

SEQ ID NO: 27212 - DNA, 122 bp, Homo sapiens
  misc_feature (61)..(62): /note="This region represents a CpG dinucleotide"
  misc_feature (61)..(61): /note="Nucleotide may be methylated to form 5-methylcytosine"
gcagatggcatgtcattttaatgctgtttctaattgacaggggcctcggtggctgtggcacgtgcggctgcatgccgggtgtagggtggggaatggaattagatactgctacctgctccttc

SEQ ID NO: 27213 - DNA, 122 bp, Homo sapiens
  misc_feature (61)..(62): /note="This region represents a CpG dinucleotide"
  misc_feature (61)..(61): /note="Nucleotide may be methylated to form 5-methylcytosine"
gccaaaataagaacagaggaactcacagatgggggttgaagatgcgactcattttggagacgtggtcgttgtcacagtctaggtcctcgtcacctggctccatgctgaacttcctcttgctg

SEQ ID NO: 27214 - DNA, 122 bp, Homo sapiens
  misc_feature (61)..(62): /note="This region represents a CpG dinucleotide"
  misc_feature (61)..(61): /note="Nucleotide may be methylated to form 5-methylcytosine"
accaaagggatccaaggttgctaggatacttcagtttcaaatatccttctttgctatccccgtaaatatacactaagttttcaaacaattcactctaatcctgattagataataaactgtga

SEQ ID NO: 27215 - DNA, 122 bp, Homo sapiens
  misc_feature (61)..(62): /note="This region represents a CpG dinucleotide"
  misc_feature (61)..(61): /note="Nucleotide may be methylated to form 5-methylcytosine"
aggaatgtcaaggctggaaggtatcttagagatcatctaatccagttcttgcttcagaaacgattcagggaagcaagtgaagtgacttggactttacctatggtaatactctctccccaccc

SEQ ID NO: 27216 - DNA, 122 bp, Homo sapiens
  misc_feature (61)..(62): /note="This region represents a CpG dinucleotide"
  misc_feature (61)..(61): /note="Nucleotide may be methylated to form 5-methylcytosine"
atatctagccaggcctgaagccttctgaggtaactgcccacatgttgagatggcccaggacgtgtggttgattctgagatgggacagagcttcttggaataaaacactccgtgggccatgtc

SEQ ID NO: 27217 - DNA, 122 bp, Homo sapiens
  misc_feature (61)..(62): /note="This region represents a CpG dinucleotide"
  misc_feature (61)..(61): /note="Nucleotide may be methylated to form 5-methylcytosine"
gcttgtcatcttaactgtgactgggccaggttcccagcacacccatgccagtgtatcccacgctccacccaggcatgacactttggtgtcagaccagggcccatggcagagggcagggcaca

SEQ ID NO: 27218 - DNA, 122 bp, Homo sapiens
  misc_feature (61)..(62): /note="This region represents a CpG dinucleotide"
  misc_feature (61)..(61): /note="Nucleotide may be methylated to form 5-methylcytosine"
tccacccccggcacaaggccgtggatcatggctaaggcgatggtaattatttattcccttcgccggaagggagtcttcagaaggaacagcgtgaagagaagagaaaaaattatctctctcgt

SEQ ID NO: 27219 - DNA, 122 bp, Homo sapiens
  misc_feature (61)..(62): /note="This region represents a CpG dinucleotide"
  misc_feature (61)..(61): /note="Nucleotide may be methylated to form 5-methylcytosine"
gtagttctaatattaactataaattcagcttctcccttgctttctcttcttacagagcaacgagaaatgaaagctggttgatggatataaataaaacaagtatatgtgcagtacagtagaat

SEQ ID NO: 27220 - DNA, 122 bp, Homo sapiens
  misc_feature (61)..(62): /note="This region represents a CpG dinucleotide"
  misc_feature (61)..(61): /note="Nucleotide may be methylated to form 5-methylcytosine"
ctccatttgtcttctgcccataacccaggagcccagagtcctagttactggtctcttttgcgtcacctattactgtttgctgtagagatgtgaggtcctactctcttggctcagttcattag

SEQ ID NO: 27221 - DNA, 122 bp, Homo sapiens
  misc_feature (61)..(62): /note="This region represents a CpG dinucleotide"
  misc_feature (61)..(61): /note="Nucleotide may be methylated to form 5-methylcytosine"
caggtcctgtgtctctttcctggtgaactccacagggacacagctgcaggtcttttgtaacgctctgtatatgcacaggaagtcccttacaacccactctgttagatctcatttcctcttcg

SEQ ID NO: 27222 - DNA, 122 bp, Homo sapiens
  misc_feature (61)..(62): /note="This region represents a CpG dinucleotide"
  misc_feature (61)..(61): /note="Nucleotide may be methylated to form 5-methylcytosine"
ttcactcaccactcactcactcattgactcatccagggcaacttccgttcctgtaagcctcgtccatggtaagtgcgccattcaggtgtaccatttttatctttttgtaattgtaattttaa

SEQ ID NO: 27223 - DNA, 122 bp, Homo sapiens
  misc_feature (61)..(62): /note="This region represents a CpG dinucleotide"
  misc_feature (61)..(61): /note="Nucleotide may be methylated to form 5-methylcytosine"
gaacataagctttaagcaacaagcaatcttgtgttaatctgagctctgttacagctctgccgtaatctcagccaaattgcttcatctgtacgtggtgataccaccatctttgtaatattgtg

SEQ ID NO: 27224 - DNA, 122 bp, Homo sapiens
  misc_feature (61)..(62): /note="This region represents a CpG dinucleotide"
  misc_feature (61)..(61): /note="Nucleotide may be methylated to form 5-methylcytosine"
tgggaggtgcgggcagggcccccccatgggtagtagtaacaacagccaggctctggcagtcgcactttcacaccggagtcctcacctcgcccacagtgccctggaagcatgagagcaggtgt

SEQ ID NO: 27225 - DNA, 122 bp, Homo sapiens
  misc_feature (61)..(62): /note="This region represents a CpG dinucleotide"
  misc_feature (61)..(61): /note="Nucleotide may be methylated to form 5-methylcytosine"
gcagcatctctttcatattcactggctgcagtttcctaaaatgccaacattcatattcctcgtgaagtgtatgacaagccatttcccattgagttaaaatgtaattgcatctggaaggggtt

SEQ ID NO: 27226 - DNA, 122 bp, Homo sapiens
  misc_feature (61)..(62): /note="This region represents a CpG dinucleotide"
  misc_feature (61)..(61): /note="Nucleotide may be methylated to form 5-methylcytosine"
catttcatgccaaactctccaacatgcttctacaaatcttttggtgtcattagctcaaaacgtaaatggattttggttattttcaatgtcataattataaatttagcttttttaagcgtgaa

SEQ ID NO: 27227 - DNA, 122 bp, Homo sapiens
  misc_feature (61)..(62): /note="This region represents a CpG dinucleotide"
  misc_feature (61)..(61): /note="Nucleotide may be methylated to form 5-methylcytosine"
cctatacatcagcaggtcccggctgcagcagctgggcaggaggcctaccgcattggttcacgtctgctgaccaagtggagagaagcagaagcagacctgggcagggcaggaggaagccatct

SEQ ID NO: 27228 - DNA, 122 bp, Homo sapiens
  misc_feature (61)..(62): /note="This region represents a CpG dinucleotide"
  misc_feature (61)..(61): /note="Nucleotide may be methylated to form 5-methylcytosine"
tcatcacttccaaacagttcttacctaagacatgcctcatccttggtaatcacactttcacgatcctatttcttttttctgtttgtttgtttgttttgttttttaaacggagtctcactctg

SEQ ID NO: 27229 - DNA, 122 bp, Homo sapiens
  misc_feature (61)..(62): /note="This region represents a CpG dinucleotide"
  misc_feature (61)..(61): /note="Nucleotide may be methylated to form 5-methylcytosine"
caatctggtaatttttcataatctcattttcctttgtcatacttttgctatccacttttacgttttaaaatccttgcatgtttattttatatgcaatgtctgataattcaacattggccacc

SEQ ID NO: 27230 - DNA, 122 bp, Homo sapiens
  misc_feature (61)..(62): /note="This region represents a CpG dinucleotide"
  misc_feature (61)..(61): /note="Nucleotide may be methylated to form 5-methylcytosine"
catgaaccatttgttttttcaacaaatattgttgagtgagcactaggaatgaaccatgcacgagacagagtatctgctctcacggagcttatcttctagtggggaaaccagacaaacatgtc

SEQ ID NO: 27231 - DNA, 122 bp, Homo sapiens
  misc_feature (61)..(62): /note="This region represents a CpG dinucleotide"
  misc_feature (61)..(61): /note="Nucleotide may be methylated to form 5-methylcytosine"
ccacacactggctgaatatagaagggaatgaagctccagaagatgatagggccacatgaccgagtaatcctagtcctgactgactgcatggaaccaagacattagggagaaatctgttttta

SEQ ID NO: 27232 - DNA, 122 bp, Homo sapiens
  misc_feature (61)..(62): /note="This region represents a CpG dinucleotide"
  misc_feature (61)..(61): /note="Nucleotide may be methylated to form 5-methylcytosine"
ctgcaggcctctctagcccttgcccaagctaaggtcccattgaaaccgggagcatctgggcgaacggggactccaagggacgggtgatagggttctttgttgagaagcagccgagcctgatg

SEQ ID NO: 27233 - DNA, 122 bp, Homo sapiens
  misc_feature (61)..(62): /note="This region represents a CpG dinucleotide"
  misc_feature (61)..(61): /note="Nucleotide may be methylated to form 5-methylcytosine"
tgtgcaagagaatgtgcactgaagtatcgtgaatagaagccaaagactggaaacaacctccgtgcccattagaagaaacagatcaatgaattacatgcatgcatgcagtgggtaccagacag

SEQ ID NO: 27234 - DNA, 122 bp, Homo sapiens
  misc_feature (61)..(62): /note="This region represents a CpG dinucleotide"
  misc_feature (61)..(61): /note="Nucleotide may be methylated to form 5-methylcytosine"
tcaaatttggtgtaccagatttaaccctagaggatgaataacatctgagacatttggtctcgtccagggagcgttataaaaagctttcagcagagtgatgtcatgtgtccttacaagggaaa

SEQ ID NO: 27235 - DNA, 122 bp, Homo sapiens
  misc_feature (61)..(62): /note="This region represents a CpG dinucleotide"
  misc_feature (61)..(61): /note="Nucleotide may be methylated to form 5-methylcytosine"
ctatgaacttttgttgattagtagataatagacagctggagcttcttaataccagacttacgcacctaaccttttggggaaatgtgctccaaaggtctgtggcaaggactctggatccactg

SEQ ID NO: 27236 - DNA, 122 bp, Homo sapiens
  misc_feature (61)..(62): /note="This region represents a CpG dinucleotide"
  misc_feature (61)..(61): /note="Nucleotide may be methylated to form 5-methylcytosine"
aattgaggaagaaccagccccaatgtggtcatgccatatgacactgcagaacccctagttcggaatggagtcaaaactgaaaagataaggcaaccaggctgatttattgtctgggtccctag

SEQ ID NO: 27237 - DNA, 122 bp, Homo sapiens
  misc_feature (61)..(62): /note="This region represents a CpG dinucleotide"
  misc_feature (61)..(61): /note="Nucleotide may be methylated to form 5-methylcytosine"
ggcattttaactttctgcattaccattttctactcaccagctccatagtagccttgaaaacgagccatctagcggccactgcagaggacagaatgaatttagaggtcccctagaaaccccat

SEQ ID NO: 27238 - DNA, 122 bp, Homo sapiens
  misc_feature (61)..(62): /note="This region represents a CpG dinucleotide"
  misc_feature (61)..(61): /note="Nucleotide may be methylated to form 5-methylcytosine"
cttgaaagacagcagtaaatagaaatcctcccaacaggcagagcctcaggtggtatacctcgccagctacttcatgtggaaaaggaagtggcctgcagtaagaatacaagtgggtttataga

SEQ ID NO: 27239 - DNA, 122 bp, Homo sapiens
  misc_feature (61)..(62): /note="This region represents a CpG dinucleotide"
  misc_feature (61)..(61): /note="Nucleotide may be methylated to form 5-methylcytosine"
ggcacacagtatgtgttcaataaatatctgtgatagaaaggaatgaatgtagctattccacgctgtgttcagagtcagctgctgacagcaggccctgaaaactgcccgtccagattacagag

SEQ ID NO: 27240 - DNA, 122 bp, Homo sapiens
  misc_feature (61)..(62): /note="This region represents a CpG dinucleotide"
  misc_feature (61)..(61): /note="Nucleotide may be methylated to form 5-methylcytosine"
atactgcctttgcacttcctctgtgccttcatcctccaagtaatcaaaattcagtgtttacgtcatgattcctctatttcttcttcaaagctgagacatgtagtcagctgtgattacttctc

SEQ ID NO: 27241 - DNA, 122 bp, Homo sapiens
  misc_feature (61)..(62): /note="This region represents a CpG dinucleotide"
  misc_feature (61)..(61): /note="Nucleotide may be methylated to form 5-methylcytosine"
tcttgctgcgtgagtgacttggtgaccccgtaaccagtcatgcattcagcatggtgtggccgtgccacgtgttacgagtcagggcagaagacaggcccagtccatgcttctgtgggggtcac

SEQ ID NO: 27242 - DNA, 122 bp, Homo sapiens
  misc_feature (61)..(62): /note="This region represents a CpG dinucleotide"
  misc_feature (61)..(61): /note="Nucleotide may be methylated to form 5-methylcytosine"
ttggtacatctactgattcgtgatttgaaaaatataaatatgtgtcatattttatgcagacgaggagaagaccttttcatgtgtatggacatacagctcgttgaagcactgtgtggcttcca

SEQ ID NO: 27243 - DNA, 122 bp, Homo sapiens
  misc_feature (61)..(62): /note="This region represents a CpG dinucleotide"
  misc_feature (61)..(61): /note="Nucleotide may be methylated to form 5-methylcytosine"
ccaaatctgagcatttcctatcaactccacactcggtgacatcacattggtaggtgaaatcggccatgctgggggtatttacaccaggagaattggcaatggctacaaatcggagaggtggt

SEQ ID NO: 27244 - DNA, 122 bp, Homo sapiens
  misc_feature (61)..(62): /note="This region represents a CpG dinucleotide"
  misc_feature (61)..(61): /note="Nucleotide may be methylated to form 5-methylcytosine"
ctgctgtaaggtactcattaaaataaagagtagcaagaaaatcaccaaatgggccgggtgcggtggctcatatattcagtatatgataataagttcctcaaatcagtgggggaaatagttaa

SEQ ID NO: 27245 - DNA, 122 bp, Homo sapiens
  misc_feature (61)..(62): /note="This region represents a CpG dinucleotide"
  misc_feature (61)..(61): /note="Nucleotide may be methylated to form 5-methylcytosine"
tttgaacggcaaatttttgggtgtcagcacagacttcctgaatgagaacaggaaatccagcgatctgtgctttgataagaactcccagagcatctgatgcgttctctaagaatcattgacat

SEQ ID NO: 27246 - DNA, 122 bp, Homo sapiens
  misc_feature (61)..(62): /note="This region represents a CpG dinucleotide"
  misc_feature (61)..(61): /note="Nucleotide may be methylated to form 5-methylcytosine"
tacatatcgatgttggctactcctatctcagggaaacacctctcccaagatggtcaagcacgacccacaaagtcaacaaggggagttcttgaacttatcaatgcaagctgctatgaatcatg

SEQ ID NO: 27247 - DNA, 122 bp, Homo sapiens
  misc_feature (61)..(62): /note="This region represents a CpG dinucleotide"
  misc_feature (61)..(61): /note="Nucleotide may be methylated to form 5-methylcytosine"
tcaggtaatccgcccgcctcggcctcccaaagtgctgggattacaggcgttaagtcacctcgcccagcctttgagaaagggattcttcacatgaattgatgtgagcacacccaaaccaacct

SEQ ID NO: 27248 - DNA, 122 bp, Homo sapiens
  misc_feature (61)..(62): /note="This region represents a CpG dinucleotide"
  misc_feature (61)..(61): /note="Nucleotide may be methylated to form 5-methylcytosine"
ctgggctgatcttggtcttaggctttctcaagctcatccacctgctgctgcggaggcagacgttggctaaggctatggacaaattcccagggcctcccacccactggctttttggacatgcc

SEQ ID NO: 27249 - DNA, 122 bp, Homo sapiens
  misc_feature (61)..(62): /note="This region represents a CpG dinucleotide"
  misc_feature (61)..(61): /note="Nucleotide may be methylated to form 5-methylcytosine"
gtgtggcatgtgtgctgacctagttaggagttgaggcttcatttctaattctgtccctttcgttttgagctgtgtgaccttgggcatgtcacctaacttctctgtatatgtcttcttatcca

SEQ ID NO: 27250 - DNA, 122 bp, Homo sapiens
  misc_feature (61)..(62): /note="This region represents a CpG dinucleotide"
  misc_feature (61)..(61): /note="Nucleotide may be methylated to form 5-methylcytosine"
ttacatcccagtggtgttgacattcagctttgtcccacaagctgctgaagacaggcagggcgccatctgtcatgttagatggtcactagttaacgataagtggtggagattacttttctgac

SEQ ID NO: 27251 - DNA, 122 bp, Homo sapiens
  misc_feature (61)..(62): /note="This region represents a CpG dinucleotide"
  misc_feature (61)..(61): /note="Nucleotide may be methylated to form 5-methylcytosine"
caatgtaaatttcatgagtcacttgaggacaaacatatttggagagagtaaacctttaaacggattttattgtcaacagctagaagtatctctatgaaataatgatctctatgactacaaaa

SEQ ID NO: 27252 - DNA, 122 bp, Homo sapiens
  misc_feature (61)..(62): /note="This region represents a CpG dinucleotide"
  misc_feature (61)..(61): /note="Nucleotide may be methylated to form 5-methylcytosine"
ctgggtgacagagcgaaactctgtctcaaaaaaaaaaaaaaaaagaaacttgcccaaggtcgcccatccaggaagcagctgaggcagggctgaaacccaggtctggctctaaaatccattaa

SEQ ID NO: 27253 - DNA, 122 bp, Homo sapiens
  misc_feature (61)..(62): /note="This region represents a CpG dinucleotide"
  misc_feature (61)..(61): /note="Nucleotide may be methylated to form 5-methylcytosine"
tgagcactttgtgtacattaatctaatttaatcctcatagcagccacgtgaggtagctaccgctgaactgaggcttagtaagattaagtaacttgcccaaggtcatacagctagtaagtggc

SEQ ID NO: 27254 - DNA, 122 bp, Homo sapiens
  misc_feature (61)..(62): /note="This region represents a CpG dinucleotide"
  misc_feature (61)..(61): /note="Nucleotide may be methylated to form 5-methylcytosine"
gatgaagagtttggcattaggcacatgttgaaattcacctgggagaatttcccttcagagcgccatgaggtgacatggcagctgcccccatggtacactctgaaggaacctaaaggaccatt

SEQ ID NO: 27255 - DNA, 122 bp, Homo sapiens
  misc_feature (61)..(62): /note="This region represents a CpG dinucleotide"
  misc_feature (61)..(61): /note="Nucleotide may be methylated to form 5-methylcytosine"
aattatttaaacagctgttaatattgcaatctctgcccagttctttctcatgcaaatccacgtgagtcctggttcaaggcaagctcagcttatcgtgcaaatcatcctctgtgactcagaag

SEQ ID NO: 27256 - DNA, 122 bp, Homo sapiens
  misc_feature (61)..(62): /note="This region represents a CpG dinucleotide"
  misc_feature (61)..(61): /note="Nucleotide may be methylated to form 5-methylcytosine"
ccccattcccactttgcagcctacattgaagccaaatcaaactattcacagctgccctggcgctctggactatgtcaagtacccttgactttgctcatgtagctggagggttctttcctctt

SEQ ID NO: 27257 - DNA, 122 bp, Homo sapiens
  misc_feature (61)..(62): /note="This region represents a CpG dinucleotide"
  misc_feature (61)..(61): /note="Nucleotide may be methylated to form 5-methylcytosine"
gatatgcacgttagttctgaactctgaaactttttttcttctgattgtaaaacatatttccgttacataagttatgaatacttacatgggctgatgagcacaggaagtaacataccctcaga

SEQ ID NO: 27258 - DNA, 122 bp, Homo sapiens
  misc_feature (61)..(62): /note="This region represents a CpG dinucleotide"
  misc_feature (61)..(61): /note="Nucleotide may be methylated to form 5-methylcytosine"
cctttcttgggggatgggctcttgccctcttctcttttcccttcctgtatctttgactaacgcctcagctttcaggcctacatgtagcagacagaagaggaagaaagaacagacgttcacag

SEQ ID NO: 27259 - DNA, 122 bp, Homo sapiens
  misc_feature (61)..(62): /note="This region represents a CpG dinucleotide"
  misc_feature (61)..(61): /note="Nucleotide may be methylated to form 5-methylcytosine"
acagtggactggtggaaaacaacagccataaatcacactgtcaggcggcggggagaggagcgaagcacaggcacatgaaggccattcacaggaaacacagtacagccgcttcctaggcagga

SEQ ID NO: 27260 - DNA, 122 bp, Homo sapiens
  misc_feature (61)..(62): /note="This region represents a CpG dinucleotide"
  misc_feature (61)..(61): /note="Nucleotide may be methylated to form 5-methylcytosine"
atgtgactctttacattttcccctttaagggttctgaccataagcagacttctgctcacacgcagattcaatctgtgttgaaaaacaggagactgctaacactgagactgaaggtggataat

SEQ ID NO: 27261 - DNA, 122 bp, Homo sapiens
  misc_feature (61)..(62): /note="This region represents a CpG dinucleotide"
  misc_feature (61)..(61): /note="Nucleotide may be methylated to form 5-methylcytosine"
taaagaacaaattttgtcaggtctctggaatctgttttccaaaattctctgtcttctctccgcaacacatttaacctgttgattatacccagtatctttttaccactctgtcttgtattgct

SEQ ID NO: 27262 - DNA, 122 bp, Homo sapiens
  misc_feature (61)..(62): /note="This region represents a CpG dinucleotide"
  misc_feature (61)..(61): /note="Nucleotide may be methylated to form 5-methylcytosine"
ctatatatatattaagctaaacatgaattcatactgatgtctcagactcgaatccattgccgcagggctcattcttgccttcctcttgcttatttgtgacttctttctctaacagggagaaa

SEQ ID NO: 27263 - DNA, 122 bp, Homo sapiens
  misc_feature (61)..(62): /note="This region represents a CpG dinucleotide"
  misc_feature (61)..(61): /note="Nucleotide may be methylated to form 5-methylcytosine"
ttcattgcagtgctgtagctggtctgttttctgtttggttagtcaacatgccccagggatcgttagctgtttttaccgttctcctggatccctgtggatttctaatgggcaaactttttaaa

SEQ ID NO: 27264 - DNA, 122 bp, Homo sapiens
  misc_feature (61)..(62): /note="This region represents a CpG dinucleotide"
  misc_feature (61)..(61): /note="Nucleotide may be methylated to form 5-methylcytosine"
agtgatgtaatcatctatgtaggatgtggtgaaagaggaaatgagatgtctgaagtcctccgggacttcccagaggtctgtataaagcttcaaataatatcctagagaaaataccactcatc

SEQ ID NO: 27265 - DNA, 122 bp, Homo sapiens
  misc_feature (61)..(62): /note="This region represents a CpG dinucleotide"
  misc_feature (61)..(61): /note="Nucleotide may be methylated to form 5-methylcytosine"
aatggttgttttaaatttgaaaatccggtcttctgtcccttacaaaggtacacagcaattcgcattcatctcagatccactctgaagcttgtagtcctgtctgtgagggaaagcttaatatc

SEQ ID NO: 27266 - DNA, 122 bp, Homo sapiens
  misc_feature (61)..(62): /note="This region represents a CpG dinucleotide"
  misc_feature (61)..(61): /note="Nucleotide may be methylated to form 5-methylcytosine"
gggacaagagaggagactggcctttatataacagggagtttggcttggcaaaaggagaggcgagcaattagttgagaatcatcttgggtttggtttgcctcgtaggcattaagttacttctt

SEQ ID NO: 27267 - DNA, 122 bp, Homo sapiens
  misc_feature (61)..(62): /note="This region represents a CpG dinucleotide"
  misc_feature (61)..(61): /note="Nucleotide may be methylated to form 5-methylcytosine"
tgtgtgatgctccctgtctgggcccatatcctgatcttggccgagtgtgccaagtgggagcggcccagggctgccgtctctgaggcagattcactcctatatatggtcacccgggagtcccc

SEQ ID NO: 27268 - DNA, 122 bp, Homo sapiens
  misc_feature (61)..(62): /note="This region represents a CpG dinucleotide"
  misc_feature (61)..(61): /note="Nucleotide may be methylated to form 5-methylcytosine"
ttctctcatttccttatctttgtgtatgctgtattgcagcacacgtcacatggagatgggcgtcaagaagttacctctcgtaccagccgctcaggagctcggtgtagaaactctatagcctc

SEQ ID NO: 27269 - DNA, 122 bp, Homo sapiens
  misc_feature (61)..(62): /note="This region represents a CpG dinucleotide"
  misc_feature (61)..(61): /note="Nucleotide may be methylated to form 5-methylcytosine"
atcctgaagtgaaattcaaaccctggtgagttaaaaccaccatctaacacctttccctcccgaagcaattgcacagaatcctctcaatcaaaaaaaattcgaagaacctgtataaaatggca

SEQ ID NO: 27270 - DNA, 122 bp, Homo sapiens
  misc_feature (61)..(62): /note="This region represents a CpG dinucleotide"
  misc_feature (61)..(61): /note="Nucleotide may be methylated to form 5-methylcytosine"
acaaataccacatgatctcactcatacatggtcattcatatattgggcaaacaccaccttcgatgtataatgatggtttggctcatcactctggtcttacaacattatttgatttctacatg

SEQ ID NO: 27271 - DNA, 122 bp, Homo sapiens
  misc_feature (61)..(62): /note="This region represents a CpG dinucleotide"
  misc_feature (61)..(61): /note="Nucleotide may be methylated to form 5-methylcytosine"
gccaccaagtcctgctgtttgtgaatgttactcacacgtgagacgtcctcacacgtgagacgtcctcgccactctctctcctcctgctgcagttcaggtcctcatcagttctcattccgatt

SEQ ID NO: 27272 - DNA, 122 bp, Homo sapiens
  misc_feature (61)..(62): /note="This region represents a CpG dinucleotide"
  misc_feature (61)..(61): /note="Nucleotide may be methylated to form 5-methylcytosine"
agagcttcattgagacaaccgtctccttttagaggaaatggagcttgggagtggttaatacgtcacacatttaggttaaagtaaagctgacactagccccacagaaactttaatttgtgtag

SEQ ID NO: 27273 - DNA, 122 bp, Homo sapiens
  misc_feature (61)..(62): /note="This region represents a CpG dinucleotide"
  misc_feature (61)..(61): /note="Nucleotide may be methylated to form 5-methylcytosine"
aggtatcatggaaaacctttaaggaaataggctgagttgactgagaagctcagagacaagcgtgtggctagcgataacaatgactgtcaggtttgttcagacctagcttatctatagaaagc

SEQ ID NO: 27274 - DNA, 122 bp, Homo sapiens
  misc_feature (61)..(62): /note="This region represents a CpG dinucleotide"
  misc_feature (61)..(61): /note="Nucleotide may be methylated to form 5-methylcytosine"
atgagccaccgcgcccagccaaaccagtcttcttaagtcaggggaggcccacactcctgccgtgtggatctcatttcctagcacttgagctctagcacctgtggaaaagagagctcctggaa

SEQ ID NO: 27275 - DNA, 122 bp, Homo sapiens
  misc_feature (61)..(62): /note="This region represents a CpG dinucleotide"
  misc_feature (61)..(61): /note="Nucleotide may be methylated to form 5-methylcytosine"
caggtagtacgctgtgggccttgggctctgaaatgtgctgacttcaggtgagcccaagcacgtccagctgtggtggctatagtgaaaggctccatctttttgagaagcagaggggaaagtaa

SEQ ID NO: 27276 - DNA, 122 bp, Homo sapiens
  misc_feature (61)..(62): /note="This region represents a CpG dinucleotide"
  misc_feature (61)..(61): /note="Nucleotide may be methylated to form 5-methylcytosine"
gaggggatgccctggcctgctgcctcaaaagctagcactctgtcactgttagtaggtgtccggcagccaaaccattttgctctgtgctccgctggcaaggacttgcggcatcgattgctcag

SEQ ID NO: 27277 - DNA, 122 bp, Homo sapiens
  misc_feature (61)..(62): /note="This region represents a CpG dinucleotide"
  misc_feature (61)..(61): /note="Nucleotide may be methylated to form 5-methylcytosine"
ggaggggctggactgtggggaggacccaactgagaatgcagaccaagaacttagtgtcgccgtgtctgtgtggttggaaagcacagcttcaggggttttccaggcaagtgtgacagccagcc

SEQ ID NO: 27278 - DNA, 122 bp, Homo sapiens
  misc_feature (61)..(62): /note="This region represents a CpG dinucleotide"
  misc_feature (61)..(61): /note="Nucleotide may be methylated to form 5-methylcytosine"
tttttactatcctgtatattaatgaaataccatcacagccagcaagatgagaacttacaacgtgaagctaagacatgaaggctgagccgttaccgtcctcaaattgcaatcttttatatata

SEQ ID NO: 27279 - DNA, 122 bp, Homo sapiens
  misc_feature (61)..(62): /note="This region represents a CpG dinucleotide"
  misc_feature (61)..(61): /note="Nucleotide may be methylated to form 5-methylcytosine"
aaaatatagtacaagcaaatgaaaaaggaagttcatgaggaagttgagtctaagagagaacgaggagatgagagagataatgaggcccttgccttaacagaaactgccttgggagggccggc

SEQ ID NO: 27280 - DNA, 122 bp, Homo sapiens
  misc_feature (61)..(62): /note="This region represents a CpG dinucleotide"
  misc_feature (61)..(61): /note="Nucleotide may be methylated to form 5-methylcytosine"
caggctccatccacttcctacattgctcgtttgatcatgagcaaagccagtgctggatttcgtcactgctgcatctactgcgttcaggacgtgttttataagcacatatgcagtggcttttc

SEQ ID NO: 27281 - DNA, 122 bp, Homo sapiens
  misc_feature (61)..(62): /note="This region represents a CpG dinucleotide"
  misc_feature (61)..(61): /note="Nucleotide may be methylated to form 5-methylcytosine"
cagttgcacagtttcataacagtttgtcaggcttttcagtaagtacatggttttagggcacgtagaacttagaatgacctcacaaggcaacttattggacaagaattatgacatttgtctcc

SEQ ID NO: 27282 - DNA, 122 bp, Homo sapiens
  misc_feature (61)..(62): /note="This region represents a CpG dinucleotide"
  misc_feature (61)..(61): /note="Nucleotide may be methylated to form 5-methylcytosine"
ggcagccaccagaagctggaagaggccaggcacagattctcccacgacacctccagagggcgtgcagcctgactgaaactggattttggcccagtgatactgattttgaacttctctgccct

SEQ ID NO: 27283 - DNA, 122 bp, Homo sapiens
  misc_feature (61)..(62): /note="This region represents a CpG dinucleotide"
  misc_feature (61)..(61): /note="Nucleotide may be methylated to form 5-methylcytosine"
gacccagaggaaggctgctgtccctttgcacacaggttctgaaagtgcgtggagagaggacgatccctcggtccctgcagaaccaggctcttgaagcatatagcagaggttctctacccagg

SEQ ID NO: 27284 - DNA, 122 bp, Homo sapiens
  misc_feature (61)..(62): /note="This region represents a CpG dinucleotide"
  misc_feature (61)..(61): /note="Nucleotide may be methylated to form 5-methylcytosine"
atcctttgtttcattgctttgacacagctcacaatgcaaggtttcttaatcctcttttagcgtaggtttgtcaatatcactttctctctgaatggataacgatgatgatgatttgccatgac

SEQ ID NO: 27285 - DNA, 122 bp, Homo sapiens
  misc_feature (61)..(62): /note="This region represents a CpG dinucleotide"
  misc_feature (61)..(61): /note="Nucleotide may be methylated to form 5-methylcytosine"
gagctttcagcacggcccagaccagattactctgtctcacaaccactttgctgacctgcccggggggccaccgaatactccccgagcgcatactatttacagaagagtcaagataagccgga

SEQ ID NO: 27286 - DNA, 122 bp, Homo sapiens
  misc_feature (61)..(62): /note="This region represents a CpG dinucleotide"
  misc_feature (61)..(61): /note="Nucleotide may be methylated to form 5-methylcytosine"
taatatcagggatacttagtttgtgcttgctccccaagactgacatctgaaatagccagtcgcaggctaccacctatgacaagtgtgagtgttttgcgacaggccgactggggactttcatc

SEQ ID NO: 27287 - DNA, 122 bp, Homo sapiens
  misc_feature (61)..(62): /note="This region represents a CpG dinucleotide"
  misc_feature (61)..(61): /note="Nucleotide may be methylated to form 5-methylcytosine"
ccaaagggcgtgggttgccaaatgcttaggaacttccgctttcagtgtttagcaggttagcggggaaatattagtcccattatttaagctgagatttgcgaggcctacacgttttttttttc

SEQ ID NO: 27288 - DNA, 122 bp, Homo sapiens
  misc_feature (61)..(62): /note="This region represents a CpG dinucleotide"
  misc_feature (61)..(61): /note="Nucleotide may be methylated to form 5-methylcytosine"
gcagcactcagagtggctgagtaacctatccaaggacacccagagggaatgcaaacttaacgtgctcctaacatcttccccgtgctcactccatcctagccatactggcccccttctgttcc

SEQ ID NO: 27289 - DNA, 122 bp, Homo sapiens
  misc_feature (61)..(62): /note="This region represents a CpG dinucleotide"
  misc_feature (61)..(61): /note="Nucleotide may be methylated to form 5-methylcytosine"
aacaatctgtgtatgtgtcattccagaactgagtgactcaactggctaagttctccctttcgcaactcatctcctgagtttcttgtaacccaggtactacccttatactgaccagttgatca

SEQ ID NO: 27290 - DNA, 122 bp, Homo sapiens
  misc_feature (61)..(62): /note="This region represents a CpG dinucleotide"
  misc_feature (61)..(61): /note="Nucleotide may be methylated to form 5-methylcytosine"
ggagatagctagaggccagttcagttccctctcccacatttctgtggcacccgggttgtgcgctgaggcccaggtttcctggaggttaggcaaagcttggctctggtccttgcgcattggcc

SEQ ID NO: 27291 - DNA, 122 bp, Homo sapiens
  misc_feature (61)..(62): /note="This region represents a CpG dinucleotide"
  misc_feature (61)..(61): /note="Nucleotide may be methylated to form 5-methylcytosine"
ccaagaacacagcctcggagtggctttgctgcgcttgccccagcttggtcaagagggccacgtgagcgtcctcacattctctcacaggccgagggctgggtcctccctgtccagctctgaac

SEQ ID NO: 27292 - DNA, 122 bp, Homo sapiens
  misc_feature (61)..(62): /note="This region represents a CpG dinucleotide"
  misc_feature (61)..(61): /note="Nucleotide may be methylated to form 5-methylcytosine"
agatattttcatctccgtgcacttggtgccaactcaaggccaagttaggaaaacagtccacgatgtactgtaaagtaatactgaatggaacaggtgagttaagaatggagtaagaatggaaa

SEQ ID NO: 27293 - DNA, 122 bp, Homo sapiens
  misc_feature (61)..(62): /note="This region represents a CpG dinucleotide"
  misc_feature (61)..(61): /note="Nucleotide may be methylated to form 5-methylcytosine"
tcaggccctaggactctgccccagccaaagctagcgtgggcgattcatggctcgccgctgcggcagctgagcaccatcagaagtgaccccatttgtgactgtcttggcctgagaatgttcca

SEQ ID NO: 27294 - DNA, 122 bp, Homo sapiens
  misc_feature (61)..(62): /note="This region represents a CpG dinucleotide"
  misc_feature (61)..(61): /note="Nucleotide may be methylated to form 5-methylcytosine"
ctaattgcagtcgtggctctttttgagatgacaaacagactgcatgtggatgatcttcagcgtaaggcatgcttctgattgctgctttcctactgccagtgctgaacattcaccttaacccc

SEQ ID NO: 27295 - DNA, 122 bp, Homo sapiens
  misc_feature (61)..(62): /note="This region represents a CpG dinucleotide"
  misc_feature (61)..(61): /note="Nucleotide may be methylated to form 5-methylcytosine"
aaattctcagacaagcacaggacctctgtatgactgcacaggtcacaggtcgcacactcacgaagccagcccagtgctcaatactgtattttagaataagcaggaatcagtttagggctgcc

SEQ ID NO: 27296 - DNA, 122 bp, Homo sapiens
  misc_feature (61)..(62): /note="This region represents a CpG dinucleotide"
  misc_feature (61)..(61): /note="Nucleotide may be methylated to form 5-methylcytosine"
ctcgagctgaaggggagttggaaaagagagaaagggtgaaaaagaaagggcgggggagaacgggtgattgtaaagaacaagcaggtcctcgtagcccagaggaagagtgagactccaggcct

SEQ ID NO: 27297 - DNA, 122 bp, Homo sapiens
  misc_feature (61)..(62): /note="This region represents a CpG dinucleotide"
  misc_feature (61)..(61): /note="Nucleotide may be methylated to form 5-methylcytosine"
ctgagcgcaagaagccaaatgtgagaagacagaaaggcatatactgcccaatgctttttacgtaaaattacatgaagttcaacaacaggaagcactaacctatgatgtcagaagccaagaca

SEQ ID NO: 27298 - DNA, 122 bp, Homo sapiens
  misc_feature (61)..(62): /note="This region represents a CpG dinucleotide"
  misc_feature (61)..(61): /note="Nucleotide may be methylated to form 5-methylcytosine"
ctctcatgtgtcttcaccctgccctcctctttggccctaaccacatttgagctctcatcgcgtcatgccttaggtgtctcaatagctcctggcatgactccctgctttagcttctgccttaa

SEQ ID NO: 27299 - DNA, 122 bp, Homo sapiens
  misc_feature (61)..(62): /note="This region represents a CpG dinucleotide"
  misc_feature (61)..(61): /note="Nucleotide may be methylated to form 5-methylcytosine"
tgatacactccttgttgctcctacccaacagcacagttgggctgtgctgactttcagtttcgcagatcactggaatatgccacgtaatctctctgagcctcagtctatcatctataaaatgg

SEQ ID NO: 27300 - DNA, 122 bp, Homo sapiens
  misc_feature (61)..(62): /note="This region represents a CpG dinucleotide"
  misc_feature (61)..(61): /note="Nucleotide may be methylated to form 5-methylcytosine"
tgagctggaacagcctgaggttttggtgctcaggatgtgtgtttgtcttggcagctgggacgacagcagctccgtcagcagcggcatcagcgacaccatagacaacctcagcactgatgaca

SEQ ID NO: 27301 - DNA, 122 bp, Homo sapiens
  misc_feature (61)..(62): /note="This region represents a CpG dinucleotide"
  misc_feature (61)..(61): /note="Nucleotide may be methylated to form 5-methylcytosine"
tttacagaaaatttctgggctgtttgacatcaccactgagagcagctagaatttgaatggcggggatactttaaaagctcagaactatagccaggcgtggtgactcactcctgtaatcccca

SEQ ID NO: 27302 - DNA, 122 bp, Homo sapiens
  misc_feature (61)..(62): /note="This region represents a CpG dinucleotide"
  misc_feature (61)..(61): /note="Nucleotide may be methylated to form 5-methylcytosine"
tcctcgcttgcttttgtaaataaagttttattggaacgccgccaaccccactcatgaatacgcgttctatggctgcttgcaagctacagctggtaacggtagagctgaggagtttccccaca

SEQ ID NO: 27303 - DNA, 122 bp, Homo sapiens
  misc_feature (61)..(62): /note="This region represents a CpG dinucleotide"
  misc_feature (61)..(61): /note="Nucleotide may be methylated to form 5-methylcytosine"
tccctaaattaccaagttacgcaaagaggagctgaccttgaacaacatctggcagtattacgtgttgtgcaagaacaggaaagacaaataccaagctctgtgcaacatttatggtggcatca

SEQ ID NO: 27304 - DNA, 122 bp, Homo sapiens
  misc_feature (61)..(62): /note="This region represents a CpG dinucleotide"
  misc_feature (61)..(61): /note="Nucleotide may be methylated to form 5-methylcytosine"
gcttccaaatatttgagacagatttatggacactgagtcacaaatggctgccatatacttcgccttttgagctagtctggtggcagaacacctctctcctgatattcaaggacctgtctcca

SEQ ID NO: 27305 - DNA, 122 bp, Homo sapiens
  misc_feature (61)..(62): /note="This region represents a CpG dinucleotide"
  misc_feature (61)..(61): /note="Nucleotide may be methylated to form 5-methylcytosine"
agctcgggaatttgagcctagcttgggcaacttggcgagtccccatttcaaaaacaaaaacgaaataaaaacccagaactttcacattagagttttatagtggctggggactatattaaatt

SEQ ID NO: 27306 - DNA, 122 bp, Homo sapiens
  misc_feature (61)..(62): /note="This region represents a CpG dinucleotide"
  misc_feature (61)..(61): /note="Nucleotide may be methylated to form 5-methylcytosine"
tgacatctgtcctttctggttctcctcttgctctgttgcttctctgcctatttctgttttcgtttattctacttcttcttttcctgatctgtatgttaaaggtccagatttttctctgtgaa

SEQ ID NO: 27307 - DNA, 122 bp, Homo sapiens
  misc_feature (61)..(62): /note="This region represents a CpG dinucleotide"
  misc_feature (61)..(61): /note="Nucleotide may be methylated to form 5-methylcytosine"
gaggagagggagggtggaggcctggcagtttacaggggcctgggagtggttagactcaggcggtgaacatggtgtgatgatgttatggtgactcagtatgccatctatccatattgtatgga

SEQ ID NO: 27308 - DNA, 122 bp, Homo sapiens
  misc_feature (61)..(62): /note="This region represents a CpG dinucleotide"
  misc_feature (61)..(61): /note="Nucleotide may be methylated to form 5-methylcytosine"
agggaaacaactggggcagctgtgtggagaatgtatttgcatcttaatgagaacatttaacgcctcaagccagagcttctaaagaagggaaattcagactttcaggtcgtctaaagaggtta

SEQ ID NO: 27309 - DNA, 122 bp, Homo sapiens
  misc_feature (61)..(62): /note="This region represents a CpG dinucleotide"
  misc_feature (61)..(61): /note="Nucleotide may be methylated to form 5-methylcytosine"
gagaggagcccacgtgagcttcctctcccctgtccctgaagaggaagcagatgaggtacacgtaccccctagccgggagcactcaagctccagcagaaagcgtatcaactccatccctctgc

SEQ ID NO: 27310 - DNA, 122 bp, Homo sapiens
  misc_feature (61)..(62): /note="This region represents a CpG dinucleotide"
  misc_feature (61)..(61): /note="Nucleotide may be methylated to form 5-methylcytosine"
cttctggagcaaagttagaaccgcagggaagcttgaaaagaggaaacagaccagcctggccggtggaggttaaattaaactacagttctctagcaggcctcgggcttggtcaggagctattg

SEQ ID NO: 27311 - DNA, 122 bp, Homo sapiens
  misc_feature (61)..(62): /note="This region represents a CpG dinucleotide"
  misc_feature (61)..(61): /note="Nucleotide may be methylated to form 5-methylcytosine"
actaggccttcacatttactcattactcattcactgactcacccagagacacttccagtacgcaggctccattcacgagacgtgccctatacaagtgcaccattttctgtcttttatactgt

SEQ ID NO: 27312 - DNA, 122 bp, Homo sapiens
  misc_feature (61)..(62): /note="This region represents a CpG dinucleotide"
  misc_feature (61)..(61): /note="Nucleotide may be methylated to form 5-methylcytosine"
gggtaatacccaccccccgcaagccaagtctctccccattctcttgctcagcctcagtcacgggaaccaccctgtggttgattcattctgacaattattataggtagcttaggaacggatgg

SEQ ID NO: 27313 - DNA, 122 bp, Homo sapiens
  misc_feature (61)..(62): /note="This region represents a CpG dinucleotide"
  misc_feature (61)..(61): /note="Nucleotide may be methylated to form 5-methylcytosine"
gtctcacttcaattatgctttcgagggattatagaattagcaattccagttttgatggcacgagctctgtcaaatcagagagacagatgtgagctcatgtaactgagaggcttccatctgtt

SEQ ID NO: 27314 - DNA, 122 bp, Homo sapiens
  misc_feature (61)..(62): /note="This region represents a CpG dinucleotide"
  misc_feature (61)..(61): /note="Nucleotide may be methylated to form 5-methylcytosine"
aggccgggacgcgatgagagatttacaaggtgtcctttcaaaaagaattcccagtggagacgaggctgaaacgtcttctttacaattacaaccaaaataattagaaaagcgcaaagtacatt

SEQ ID NO: 27315 - DNA, 122 bp, Homo sapiens
  misc_feature (61)..(62): /note="This region represents a CpG dinucleotide"
  misc_feature (61)..(61): /note="Nucleotide may be methylated to form 5-methylcytosine"
agttagcaatgggttaaccaaatttgcagaccactcattttaacttattgtataactgtgcgatctagaaggtggaaagacacagtgtaatggcttatagaggagattataagaattagctc

SEQ ID NO: 27316 - DNA, 122 bp, Homo sapiens
  misc_feature (61)..(62): /note="This region represents a CpG dinucleotide"
  misc_feature (61)..(61): /note="Nucleotide may be methylated to form 5-methylcytosine"
ctgtctctacccttggagaataccaacacctaacttatccctcagatgagtccccgaatccggcttgcctctggctcagagcagagcaggctgtgtgctgatgacacaccatgccatcagtc

SEQ ID NO: 27317 - DNA, 122 bp, Homo sapiens
  misc_feature (61)..(62): /note="This region represents a CpG dinucleotide"
  misc_feature (61)..(61): /note="Nucleotide may be methylated to form 5-methylcytosine"
caaggatttagcagaacaaacgggatcttaggacccctgccaggctgaaatcttccccaccgcagggtaccacgcttgtaccgagcccacctccttggagtaccccctgggtacgtttcgct

SEQ ID NO: 27318 - DNA, 122 bp, Homo sapiens
  misc_feature (61)..(62): /note="This region represents a CpG dinucleotide"
  misc_feature (61)..(61): /note="Nucleotide may be methylated to form 5-methylcytosine"
attgtttgacttaacatgtgtcacgcctttcttttctcatctgtgaagtggcaataacagcggaagctgcatcgtaaggtgtttgagtggattaaatacaataatcatgcatgcacagggct

SEQ ID NO: 27319 - DNA, 122 bp, Homo sapiens
  misc_feature (61)..(62): /note="This region represents a CpG dinucleotide"
  misc_feature (61)..(61): /note="Nucleotide may be methylated to form 5-methylcytosine"
agaggaattgcatgagccttcccttgtgctcatgagtgcttgtgtgacaacttcgcagtacgagtcaatgccataaagtgccatatgcaatgcagggatattgttgtgtttccgtaagagcc

SEQ ID NO: 27320 - DNA, 122 bp, Homo sapiens
  misc_feature (61)..(62): /note="This region represents a CpG dinucleotide"
  misc_feature (61)..(61): /note="Nucleotide may be methylated to form 5-methylcytosine"
cgtgatctgggtgccacacattactatcagtattgcaagctgaagtatttcctgttacaacgcccattggttcccacaggtgcaagtgcctatgggtggtggcaattcacccttccttttgt

SEQ ID NO: 27321 - DNA, 122 bp, Homo sapiens
  misc_feature (61)..(62): /note="This region represents a CpG dinucleotide"
  misc_feature (61)..(61): /note="Nucleotide may be methylated to form 5-methylcytosine"
gctaactcagcctcctggagagacacacacggattcacacagaaacacatgaccatgtggcgtcccagatggagagacaaacagacaaagagaggcaagtaaagacagaccaacaaatgacc

SEQ ID NO: 27322 - DNA, 122 bp, Homo sapiens
  misc_feature (61)..(62): /note="This region represents a CpG dinucleotide"
  misc_feature (61)..(61): /note="Nucleotide may be methylated to form 5-methylcytosine"
tggagactatgggaataaactcacacatttatggtcaattgattttttacaagggtgatacgaaaatccaatggcgctaagaaaatccaatggcaaaagaatggtgttttcaacaaatgatg

SEQ ID NO: 27323 - DNA, 122 bp, Homo sapiens
  misc_feature (61)..(62): /note="This region represents a CpG dinucleotide"
  misc_feature (61)..(61): /note="Nucleotide may be methylated to form 5-methylcytosine"
ggtcactgagtgccacatcaaaacatgcaggtcacatgcaagaactgtgtaaacacaccacgcccttaacaagcactgctgtgcggacagggcctgctgttatccagccccaagtcatctgc

SEQ ID NO: 27324 - DNA, 122 bp, Homo sapiens
  misc_feature (61)..(62): /note="This region represents a CpG dinucleotide"
  misc_feature (61)..(61): /note="Nucleotide may be methylated to form 5-methylcytosine"
cagccagattatgtatgctttagaggccattcatatgactttggcttactcagagtaagacgggaataggagagtgacctgatctggcttaaacatataacctgaatatactttttagcccc

SEQ ID NO: 27325 - DNA, 122 bp, Homo sapiens
  misc_feature (61)..(62): /note="This region represents a CpG dinucleotide"
  misc_feature (61)..(61): /note="Nucleotide may be methylated to form 5-methylcytosine"
ctccgactcgcccgccttggccaggaacaccagcgcctggttcagcgccgcctcgtccaccgccagcagctcctgcaccgcgtccacgcccatatagtagtagacctggggtcggggacgcg

SEQ ID NO: 27326 - DNA, 122 bp, Homo sapiens
  misc_feature (61)..(62): /note="This region represents a CpG dinucleotide"
  misc_feature (61)..(61): /note="Nucleotide may be methylated to form 5-methylcytosine"
agataaacactttatctttgagagaaaccacttccttctctctccccttttgctcagtcacgggatctagcccatctgtagccacaagagtgggagtgagaccagtcatacaattcaaattt

SEQ ID NO: 27327 - DNA, 122 bp, Homo sapiens
  misc_feature (61)..(62): /note="This region represents a CpG dinucleotide"
  misc_feature (61)..(61): /note="Nucleotide may be methylated to form 5-methylcytosine"
attgctggccagtttctggtacgtagttatggaaatataggaaagcacaattctgtctgacgaaggaacatatatatctgcttgtggagtattaagtgtgagatatgccaggtagtattttc

SEQ ID NO: 27328 - DNA, 122 bp, Homo sapiens
  misc_feature (61)..(62): /note="This region represents a CpG dinucleotide"
  misc_feature (61)..(61): /note="Nucleotide may be methylated to form 5-methylcytosine"
ccaatttcttttttttattgttcacatcagagtgccttagtgtgttcagcacttcctttgcgctctcccatgtgtgtgactcagtctgctgagttggtttatcatctgaccttcacttggtg

SEQ ID NO: 27329 - DNA, 122 bp, Homo sapiens
  misc_feature (61)..(62): /note="This region represents a CpG dinucleotide"
  misc_feature (61)..(61): /note="Nucleotide may be methylated to form 5-methylcytosine"
aattactgaggatgattaacaaacacaatgaaaactggatcaacggctccgtagtccatacgttgaaatggtactagagatggtatgttgcctatacactacagtcaacactagtattctct

SEQ ID NO: 27330 - DNA, 122 bp, Homo sapiens
  misc_feature (61)..(62): /note="This region represents a CpG dinucleotide"
  misc_feature (61)..(61): /note="Nucleotide may be methylated to form 5-methylcytosine"
attccaaccctgctttatcttagattctgagctttgacttgtgcagctgaatgtgggtggcgaaaaccccacaaccgtgctgctgtgtctcaaacgtgccgctgaggcatctggtgggctct

SEQ ID NO: 27331 - DNA, 122 bp, Homo sapiens
  misc_feature (61)..(62): /note="This region represents a CpG dinucleotide"
  misc_feature (61)..(61): /note="Nucleotide may be methylated to form 5-methylcytosine"
tggcccagttgggacccttccctgccattttccctgggccccagtgcaagctgtaaacagcggtcaccaggccagccctgtgtttgctggcagcactgaacttggccccttttcccactgag

SEQ ID NO: 27332 - DNA, 122 bp, Homo sapiens
  misc_feature (61)..(62): /note="This region represents a CpG dinucleotide"
  misc_feature (61)..(61): /note="Nucleotide may be methylated to form 5-methylcytosine"
gtttcactcccctgccttgatatcacccaagttatgagcagagtaagaagatggacattgcgtcacagaaccagcgatagcaagctaacacgcaaggagagccagcaatgtggaagttcagg

SEQ ID NO: 27333 - DNA, 122 bp, Homo sapiens
  misc_feature (61)..(62): /note="This region represents a CpG dinucleotide"
  misc_feature (61)..(61): /note="Nucleotide may be methylated to form 5-methylcytosine"
gccaaatgctctgcaggaaacacgctgaagatgcagaggaggggcgatgaggagtggtgccggatagagtcatggatcatgaaaagtttctgggaagaaccaatgcttgagctgagtcttaa

SEQ ID NO: 27334 - DNA, 122 bp, Homo sapiens
  misc_feature (61)..(62): /note="This region represents a CpG dinucleotide"
  misc_feature (61)..(61): /note="Nucleotide may be methylated to form 5-methylcytosine"
aatgactttggtttgaagtatagttacctttgtaagctacagcaggtctttggataatgtcgttcattataaagtcagtgagaaaaaaattgattcctggcaggggcaactgtctgtgtgga

SEQ ID NO: 27335 - DNA, 122 bp, Homo sapiens
  misc_feature (61)..(62): /note="This region represents a CpG dinucleotide"
  misc_feature (61)..(61): /note="Nucleotide may be methylated to form 5-methylcytosine"
gacaggctgactccctgcatttttctaagtcaaaataaaaacaattcctttatgccgtcacgttgcagccaagttaagtcttcaatacagtcatgcattgcttaatggccaggacacgttct

SEQ ID NO: 27336 - DNA, 122 bp, Homo sapiens
  misc_feature (61)..(62): /note="This region represents a CpG dinucleotide"
  misc_feature (61)..(61): /note="Nucleotide may be methylated to form 5-methylcytosine"
attagctcaaaactccacaagagctatgatgcgtgctccgttcttgaaggacccaagagacgctccatcttaccctctgagccttccttgttatgtttcatgtgggtggaatatatgaccag

SEQ ID NO: 27337 - DNA, 122 bp, Homo sapiens
  misc_feature (61)..(62): /note="This region represents a CpG dinucleotide"
  misc_feature (61)..(61): /note="Nucleotide may be methylated to form 5-methylcytosine"
agaatccccatgtgttgctctcaacagagctgagaatcgcattaccagaggcatgactggcgtagacctctcatgccacacaaatgcctcacttctccacctggggttagcaaaaaactttc

SEQ ID NO: 27338 - DNA, 122 bp, Homo sapiens
  misc_feature (61)..(62): /note="This region represents a CpG dinucleotide"
  misc_feature (61)..(61): /note="Nucleotide may be methylated to form 5-methylcytosine"
aaacatagccataaattctccgacacttctattgagaagtgacgatctgtgtcccctcctcgtgaatctgagcagacttgtgactactttaaccaatggagtttagtggaaaggaagctatg

SEQ ID NO: 27339 - DNA, 122 bp, Homo sapiens
  misc_feature (61)..(62): /note="This region represents a CpG dinucleotide"
  misc_feature (61)..(61): /note="Nucleotide may be methylated to form 5-methylcytosine"
ccccgcaactacacacaccagacctccaaattactgctcttcgattaggaataatatactcgctgaacctacagcccaaagcagaaaggctgggccagcccagtagtcctgaatcagctgca

SEQ ID NO: 27340 - DNA, 122 bp, Homo sapiens
  misc_feature (61)..(62): /note="This region represents a CpG dinucleotide"
  misc_feature (61)..(61): /note="Nucleotide may be methylated to form 5-methylcytosine"
actctacaaagaagcaagtgtttaatctaattctgcaaatatttgagactctttaccaggcgttgtggaacatgctttatgactggaaaagatgataaaggcatagtttctgccctaaggag

SEQ ID NO: 27341 - DNA, 122 bp, Homo sapiens
  misc_feature (61)..(62): /note="This region represents a CpG dinucleotide"
  misc_feature (61)..(61): /note="Nucleotide may be methylated to form 5-methylcytosine"
tgcccgaaatgtcagagtaaataagcatatcgtccagagcgctgcctggaaccagagtctcgttttgttggaggcattaggggaaaggcaagggagctcagctccaggggtattgcgcccta

SEQ ID NO: 27342 - DNA, 122 bp, Homo sapiens
  misc_feature (61)..(62): /note="This region represents a CpG dinucleotide"
  misc_feature (61)..(61): /note="Nucleotide may be methylated to form 5-methylcytosine"
tctctgtatttctatatgaacaaatatagtcccaatgcccttttttcttttgccattttgcgtacagcaaatgtcctgcaagtcatgttctaaatatagatgtgttaaatttcaaatgtgaa

SEQ ID NO: 27343 - DNA, 122 bp, Homo sapiens
  misc_feature (61)..(62): /note="This region represents a CpG dinucleotide"
  misc_feature (61)..(61): /note="Nucleotide may be methylated to form 5-methylcytosine"
ttcactgcaagctataaactctacaagtggtgcgcccgaagtgatcgccttgaagttgcacgtgaaggaggaaaactccttaatttttggggaatcccagtaagggacagtcctgattgcca

SEQ ID NO: 27344 - DNA, 122 bp, Homo sapiens
  misc_feature (61)..(62): /note="This region represents a CpG dinucleotide"
  misc_feature (61)..(61): /note="Nucleotide may be methylated to form 5-methylcytosine"
caggttcagtgtgtacaagatactgactatatcagtgagatatgcccttatagcaagtcacgtgaaaccatagaaatgaccatgaagaaattattttttatctcatctctcatttcaaaacc

SEQ ID NO: 27345 - DNA, 122 bp, Homo sapiens
  misc_feature (61)..(62): /note="This region represents a CpG dinucleotide"
  misc_feature (61)..(61): /note="Nucleotide may be methylated to form 5-methylcytosine"
cacacacatacacacacacacaccctgtgccctgggtagaggcagtggcacagctgtgggcgctttgcttttctgctcttcctggttccacatctagaattttgtgacttggtgagggggtg

SEQ ID NO: 27346 - DNA, 122 bp, Homo sapiens
  misc_feature (61)..(62): /note="This region represents a CpG dinucleotide"
  misc_feature (61)..(61): /note="Nucleotide may be methylated to form 5-methylcytosine"
catgtgtattattaaacattcaaatgaaacagaaatatttgcctgtggggagaatgtctgcggtggcctctggtgacagctctgcaacagaactgagacagccacctcgcatggtgcttggg

SEQ ID NO: 27347 - DNA, 122 bp, Homo sapiens
  misc_feature (61)..(62): /note="This region represents a CpG dinucleotide"
  misc_feature (61)..(61): /note="Nucleotide may be methylated to form 5-methylcytosine"
tcactaggaaatattcatgactatgtccctaaatctgcaacaaaataagctagatactaccgttctctggatttgagcaattttggaaattcaaattttgttaaatataaagtgattaaaca

SEQ ID NO: 27348 - DNA, 122 bp, Homo sapiens
  misc_feature (61)..(62): /note="This region represents a CpG dinucleotide"
  misc_feature (61)..(61): /note="Nucleotide may be methylated to form 5-methylcytosine"
tggctttgatcctcatgtttgcttttcccttggtgcaatattgctgctgcatcttgactgcgttccagtcaggaggaagaaatgcagaacaccaaaactttcatttatatctcactggccaa

SEQ ID NO: 27349 - DNA, 122 bp, Homo sapiens
  misc_feature (61)..(62): /note="This region represents a CpG dinucleotide"
  misc_feature (61)..(61): /note="Nucleotide may be methylated to form 5-methylcytosine"
attgcatcacattttatgacctaatcttgtaagttgcacagcactacatcctctgcatgccgtagattacaaacaagtcactaaggttcatccagattcaagggaagatatgtagacttcat

SEQ ID NO: 27350 - DNA, 122 bp, Homo sapiens
  misc_feature (61)..(62): /note="This region represents a CpG dinucleotide"
  misc_feature (61)..(61): /note="Nucleotide may be methylated to form 5-methylcytosine"
attcgctcgcctcagcctcccaaagtgctgggattacaggcatgagtcactgcacccggccgaagagatgtctttctaattcactcacagatgctatataggctagctggggctctgcacat

SEQ ID NO: 27351 - DNA, 122 bp, Homo sapiens
  misc_feature (61)..(62): /note="This region represents a CpG dinucleotide"
  misc_feature (61)..(61): /note="Nucleotide may be methylated to form 5-methylcytosine"
aaacagaagcaggacagtcttgctctgcagccttgggcgggatagcacaaaggccaggagcgtggagctccgtggctctagatcctgcctgtcacctgtcatgtgtgtgacttgggcaggtt

SEQ ID NO: 27352 - DNA, 122 bp, Homo sapiens
  misc_feature (61)..(62): /note="This region represents a CpG dinucleotide"
  misc_feature (61)..(61): /note="Nucleotide may be methylated to form 5-methylcytosine"
gagctcagctcctggtgctcacactctgtgtggcttgggctcctcatgtaaccttggagccgcagtggcccccgtctgtaaaaacaggattgttaagatgctcctggggctatctggaggat

SEQ ID NO: 27353 - DNA, 122 bp, Homo sapiens
  misc_feature (61)..(62): /note="This region represents a CpG dinucleotide"
  misc_feature (61)..(61): /note="Nucleotide may be methylated to form 5-methylcytosine"
actcagggaaatagctccccacaaggcattgcattagggagaaactatggtgaggaacagcgatgagcaggacatgaagagtgatggtcctaagccagatatgatgtcatgagggtgaactc

SEQ ID NO: 27354 - DNA, 122 bp, Homo sapiens
  misc_feature (61)..(62): /note="This region represents a CpG dinucleotide"
  misc_feature (61)..(61): /note="Nucleotide may be methylated to form 5-methylcytosine"
ttatcttgttgctcaagttattccaactttgaccactaagagttccttcaggttggcttccgtgtccttttgacatgacttcatactatttggagcactttcttactttctgacacacagga

SEQ ID NO: 27355 - DNA, 122 bp, Homo sapiens
  misc_feature (61)..(62): /note="This region represents a CpG dinucleotide"
  misc_feature (61)..(61): /note="Nucleotide may be methylated to form 5-methylcytosine"
tgcccgtggtcacagcacttgtcagtggcagagctgggattccaacctggccagggcttccggccagcaagccctgagctttttcctccctacagacacacacaggaagttactgcaaacct

SEQ ID NO: 27356 - DNA, 122 bp, Homo sapiens
  misc_feature (61)..(62): /note="This region represents a CpG dinucleotide"
  misc_feature (61)..(61): /note="Nucleotide may be methylated to form 5-methylcytosine"
ctttagagagccgggcccaccttctgcttgaagtggaggcccaggcaggcagttgtagtgcgtggccccaagatgccagcctcgtgcagggccggcgatgattcgcttctcactcactccac

SEQ ID NO: 27357 - DNA, 122 bp, Homo sapiens
  misc_feature (61)..(62): /note="This region represents a CpG dinucleotide"
  misc_feature (61)..(61): /note="Nucleotide may be methylated to form 5-methylcytosine"
gctagccccattctggctcacttttttctttttttataggacgcccattgcaatgcgagccggcagataaaagccgtgacgtgctgtctgcccaagcgcaaggatcgcctgcaatcccccag

SEQ ID NO: 27358 - DNA, 122 bp, Homo sapiens
  misc_feature (61)..(62): /note="This region represents a CpG dinucleotide"
  misc_feature (61)..(61): /note="Nucleotide may be methylated to form 5-methylcytosine"
cacaataagtggggttcattacaatgtcaatctcacaaggtagttgtgagtaccaaaaagcgtggtgcatatcaaagttcctcgcaaaactttgatactgaaagcatggtccaatgaggtca

SEQ ID NO: 27359 - DNA, 122 bp, Homo sapiens
  misc_feature (61)..(62): /note="This region represents a CpG dinucleotide"
  misc_feature (61)..(61): /note="Nucleotide may be methylated to form 5-methylcytosine"
caaatttggttttagaaagtgctccctctagtaatggaatgttttctgattttacagtgccgagcactgtctaaaagactggccttggctgaaaagtctaaggaagcattgacagaagaaat

SEQ ID NO: 27360 - DNA, 122 bp, Homo sapiens
  misc_feature (61)..(62): /note="This region represents a CpG dinucleotide"
  misc_feature (61)..(61): /note="Nucleotide may be methylated to form 5-methylcytosine"
aaaggcaaatccgaattccaaatcagtcattgatatgaacatgaaatccccaaggaagcacgttccaagctgagtaagaatgataagggttagatgagttgtcaattgcttcacagcatatt

SEQ ID NO: 27361 - DNA, 122 bp, Homo sapiens
  misc_feature (61)..(62): /note="This region represents a CpG dinucleotide"
  misc_feature (61)..(61): /note="Nucleotide may be methylated to form 5-methylcytosine"
tgtatctggcgagggcctccttgctgaatcatcccatggtggaaagtggaagggcaacagcgcacttgtgggagagagagcaggacatcaaactcacagcctcaagctcttttctaattggc

SEQ ID NO: 27362 - DNA, 122 bp, Homo sapiens
  misc_feature (61)..(62): /note="This region represents a CpG dinucleotide"
  misc_feature (61)..(61): /note="Nucleotide may be methylated to form 5-methylcytosine"
gcgtttgcaggtcctttcttcacaggtttgaaccgtgtagttaatgtggcagacacataacgctgtgctaaaacattctcatggcttattttcactggattcacagtactagagtcaacagc

SEQ ID NO: 27363 - DNA, 122 bp, Homo sapiens
  misc_feature (61)..(62): /note="This region represents a CpG dinucleotide"
  misc_feature (61)..(61): /note="Nucleotide may be methylated to form 5-methylcytosine"
ttgtactcaatctgtcaggaaatcttgttggctatacctttaaaacatctctctcacctacgcactctcccaccttgactgatacaagcctaaactaagcaccaccaggtcttgctttgatg

SEQ ID NO: 27364 - DNA, 122 bp, Homo sapiens
  misc_feature (61)..(62): /note="This region represents a CpG dinucleotide"
  misc_feature (61)..(61): /note="Nucleotide may be methylated to form 5-methylcytosine"
ggagccagggatccttcctcacaggcaacagggttagaatgtgaatccaggcatgtctgacgttaagcccaagctctctttctgctgcacaatgactcaacccgcttgcatcatctggacgg

SEQ ID NO: 27365 - DNA, 122 bp, Homo sapiens
  misc_feature (61)..(62): /note="This region represents a CpG dinucleotide"
  misc_feature (61)..(61): /note="Nucleotide may be methylated to form 5-methylcytosine"
aatgcagacatgccgaagtgcatctgtctgggtagttaacatgatctaaacatccctcttcgttccgctaactccggctcttcttcgggctcctcggcagcgctccgggccagccggcccgt

SEQ ID NO: 27366 - DNA, 122 bp, Homo sapiens
  misc_feature (61)..(62): /note="This region represents a CpG dinucleotide"
  misc_feature (61)..(61): /note="Nucleotide may be methylated to form 5-methylcytosine"
aacaaatgccaaacaggtttgtgtcagacaacaatataggaagcccctctgcctgaccttcgcttgatggtaatactcactatttagctatgtaaaacctgtggtgacttgtctaggatctg

SEQ ID NO: 27367 - DNA, 122 bp, Homo sapiens
  misc_feature (61)..(62): /note="This region represents a CpG dinucleotide"
  misc_feature (61)..(61): /note="Nucleotide may be methylated to form 5-methylcytosine"
atacgattctttcattccatagaagacccaaggaccaagtttgtttaagaagactgtttccgtctcaggttcagcatcaaaggatctgaaccttcaggatggaaggcaaacccatatgcagc

SEQ ID NO: 27368 - DNA, 122 bp, Homo sapiens
  misc_feature (61)..(62): /note="This region represents a CpG dinucleotide"
  misc_feature (61)..(61): /note="Nucleotide may be methylated to form 5-methylcytosine"
atgcttttgcatataacaagacttacacgtgactatagattccacttgcaccatgcttttcgtggactcatttgttcagggatgtggatgtaattgacattccattttactaagcacatcgt

SEQ ID NO: 27369 - DNA, 122 bp, Homo sapiens
  misc_feature (61)..(62): /note="This region represents a CpG dinucleotide"
  misc_feature (61)..(61): /note="Nucleotide may be methylated to form 5-methylcytosine"
gcgggcaccctcccaccttacccccttggtcctatgtggcgcagcgccctcctgccctcccggccctttcagctgtgaggttcccccaggccgtttctttgtaccacccgccccccaccccc

SEQ ID NO: 27370 - DNA, 122 bp, Homo sapiens
  misc_feature (61)..(62): /note="This region represents a CpG dinucleotide"
  misc_feature (61)..(61): /note="Nucleotide may be methylated to form 5-methylcytosine"
gatctctttatcagatatatgacttgccagtattttccactagcctgtggtttatcttttcgttttcttaactatctatttaagaacagattcttaattttgatgaagtccaatcactttaa

SEQ ID NO: 27371 - DNA, 122 bp, Homo sapiens
  misc_feature (61)..(62): /note="This region represents a CpG dinucleotide"
  misc_feature (61)..(61): /note="Nucleotide may be methylated to form 5-methylcytosine"
tgtctccctggggagcaaggcaggctggcctccgccagggctgccctcgggaggtgctgccgggactgtctcagcaggaagaatggccctggcttgtcacccacccaaagaccctctgccag

SEQ ID NO: 27372 - DNA, 122 bp, Homo sapiens
  misc_feature (61)..(62): /note="This region represents a CpG dinucleotide"
  misc_feature (61)..(61): /note="Nucleotide may be methylated to form 5-methylcytosine"
agtcacagagccgggcctcaacctggcctttaaaaagacgctacccgtttacattctcagcgtgagtagaagaaactgcccatgtcccttcacctttcccagtattcaatattatattttta

SEQ ID NO: 27373 - DNA, 122 bp, Homo sapiens
  misc_feature (61)..(62): /note="This region represents a CpG dinucleotide"
  misc_feature (61)..(61): /note="Nucleotide may be methylated to form 5-methylcytosine"
aattgcatattcttgacctcgtgtgccggaaggggagactggagctcagacaggctacaacgcgtccaaggtcacacacctagttagtgagtgaatctggattgaaacttacatttcccagg

SEQ ID NO: 27374 - DNA, 122 bp, Homo sapiens
  misc_feature (61)..(62): /note="This region represents a CpG dinucleotide"
  misc_feature (61)..(61): /note="Nucleotide may be methylated to form 5-methylcytosine"
aacctatataaagtggctagcatagcatctgacatatagaaaactcttaatagggccggacgtggtggcttatgcctgtaatcctagcactctgggaggccgaggcagaaggatcgcttgag

SEQ ID NO: 27375 - DNA, 122 bp, Homo sapiens
  misc_feature (61)..(62): /note="This region represents a CpG dinucleotide"
  misc_feature (61)..(61): /note="Nucleotide may be methylated to form 5-methylcytosine"
acacacgtgaaatttgaaagggaggcagagatgagcttcctgcagcagggagagttgacacgcaggttctgacagacacaggatttgcatgggttagatgaatgctgcactctctagatgca

SEQ ID NO: 27376 - DNA, 122 bp, Homo sapiens
  misc_feature (61)..(62): /note="This region represents a CpG dinucleotide"
  misc_feature (61)..(61): /note="Nucleotide may be methylated to form 5-methylcytosine"
tccttgtggattcatatggaaatggacacctgccatgtttgcaggcagaaaaacaggcttcgaattccacccacacctgatggctattctctgcctggaacgcctctcttaccctcccatgg

SEQ ID NO: 27377 - DNA, 122 bp, Homo sapiens
  misc_feature (61)..(62): /note="This region represents a CpG dinucleotide"
  misc_feature (61)..(61): /note="Nucleotide may be methylated to form 5-methylcytosine"
ctccacttacggtgggacttccctagaaaacacctgaggtttaccaattttagaggggaccgagggagaggcaggaaatggtgcctggtgagagcacgctcccttcctgtctcagagggttg

SEQ ID NO: 27378 - DNA, 122 bp, Homo sapiens
  misc_feature (61)..(62): /note="This region represents a CpG dinucleotide"
  misc_feature (61)..(61): /note="Nucleotide may be methylated to form 5-methylcytosine"
aagccagccggggaaggcctctctaggtgggtcattgagtaggctgctcacttggagggccgcctgccagcctggggagggggacagaaggggagggctggggtggatgggggacactgtaa

SEQ ID NO: 27379 - DNA, 122 bp, Homo sapiens
  misc_feature (61)..(62): /note="This region represents a CpG dinucleotide"
  misc_feature (61)..(61): /note="Nucleotide may be methylated to form 5-methylcytosine"
ccttccttccttccttccttccttccttccttcctccttcctgtttgacgaatgagttatcgttgacctatagtgtcagatattggggtgggcacaggcgatacttattcgtttgaatatgc

SEQ ID NO: 27380 - DNA, 122 bp, Homo sapiens
  misc_feature (61)..(62): /note="This region represents a CpG dinucleotide"
  misc_feature (61)..(61): /note="Nucleotide may be methylated to form 5-methylcytosine"
ggtggtgagtcagtattcaaagatgaatgggccaaaataagagtttaaaaacatgtgagacgtgtggatggatattacaataggtcaattgcatcacattaaacttattctggacatggctg

SEQ ID NO: 27381 - DNA, 122 bp, Homo sapiens
  misc_feature (61)..(62): /note="This region represents a CpG dinucleotide"
  misc_feature (61)..(61): /note="Nucleotide may be methylated to form 5-methylcytosine"
ggagcagtttagctggtgagtcaagatgtcacttgaggccgcagtcatctgaaggcttgacggaggctgaaagacctgttaccaagataattcacttgcatagctgttgcagaggcctcatt

SEQ ID NO: 27382 - DNA, 122 bp, Homo sapiens
  misc_feature (61)..(62): /note="This region represents a CpG dinucleotide"
  misc_feature (61)..(61): /note="Nucleotide may be methylated to form 5-methylcytosine"
cggccgcttatcattcacaacctttcccctgcattatttcatttaatcctgagccaacatcgccaggcaggcaccgtgcttattcccatcccacaggtgagaaaacaggctcagagaagcca

SEQ ID NO: 27383 - DNA, 122 bp, Homo sapiens
  misc_feature (61)..(62): /note="This region represents a CpG dinucleotide"
  misc_feature (61)..(61): /note="Nucleotide may be methylated to form 5-methylcytosine"
aggttcggtagagaaaaatagtaagctggtttagaaactgacgagggcaaacagccaggacgcattggagaggaatttgccaaagatctaccctgagataacgcctgtccagtgtcttcacc

SEQ ID NO: 27384 - DNA, 122 bp, Homo sapiens
  misc_feature (61)..(62): /note="This region represents a CpG dinucleotide"
  misc_feature (61)..(61): /note="Nucleotide may be methylated to form 5-methylcytosine"
cccaaacacctctcactaggccctacctcagcattagggatcacatttcaacaggagattcggaggagacacacaccatcttaaccatttctaagtgtacagttttgtaatattaattacat

SEQ ID NO: 27385 - DNA, 122 bp, Homo sapiens
  misc_feature (61)..(62): /note="This region represents a CpG dinucleotide"
  misc_feature (61)..(61): /note="Nucleotide may be methylated to form 5-methylcytosine"
tctttgttgtcaacaccgggaatagtagtgctgctcctgaacaactggctcatctgatcacgtggacactgaatgttactgattgcatctctctcttgctgagctgacaccaaaaggcttag

SEQ ID NO: 27386 - DNA, 122 bp, Homo sapiens
  misc_feature (61)..(62): /note="This region represents a CpG dinucleotide"
  misc_feature (61)..(61): /note="Nucleotide may be methylated to form 5-methylcytosine"
ggtgacataagcatgaacagaactgtggaagcactagagcaggatcagcacatcatgcctcggggaagcaggagacagcattatatatggtaattcaaaattaaatggaatcatgagcaacc

SEQ ID NO: 27387 - DNA, 122 bp, Homo sapiens
  misc_feature (61)..(62): /note="This region represents a CpG dinucleotide"
  misc_feature (61)..(61): /note="Nucleotide may be methylated to form 5-methylcytosine"
gagccccaaagaataatggaactatgcagataaggtgaatttggctgctgaagaaacaaacgttactctacaatggtgttgtcagttgacaacatctatttattgaacacagcacagagcac

SEQ ID NO: 27388 - DNA, 122 bp, Homo sapiens
  misc_feature (61)..(62): /note="This region represents a CpG dinucleotide"
  misc_feature (61)..(61): /note="Nucleotide may be methylated to form 5-methylcytosine"
aaaaatgcgctgaagctgtggctgatggaaaggtccaacgactacttcgtgctgcagcggcgtcggggctacggggaggaaggcggaggggggctcacaggtaagctgtggccaccctacct

SEQ ID NO: 27389 - DNA, 122 bp, Homo sapiens
  misc_feature (61)..(62): /note="This region represents a CpG dinucleotide"
  misc_feature (61)..(61): /note="Nucleotide may be methylated to form 5-methylcytosine"
gaacaagacagagagggtctcactgttgagaaaaatttattatcaatgtctcagagccaacgacgacacgaacctacatgaacacaactcttaatttaggacccaagggtgactgtaaacat

SEQ ID NO: 27390 - DNA, 122 bp, Homo sapiens
  misc_feature (61)..(62): /note="This region represents a CpG dinucleotide"
  misc_feature (61)..(61): /note="Nucleotide may be methylated to form 5-methylcytosine"
aagtgctgggattacaggcatgagtcaccacgcccggccctagattgtttaagtctttaacgaaatcccatttcttctcattccttagtcctttcccagccgtagcaaaaacaaacaaaaaa

SEQ ID NO: 27391 - DNA, 122 bp, Homo sapiens
  misc_feature (61)..(62): /note="This region represents a CpG dinucleotide"
  misc_feature (61)..(61): /note="Nucleotide may be methylated to form 5-methylcytosine"
ggactaaatctccttcctcttatcactctaggacaaagacgacaaaaggtatccagatcacgaggtcaagtgattgatttgtgacccatgtgacccatacataaatggcagtgagccatagg

SEQ ID NO: 27392 - DNA, 122 bp, Homo sapiens
  misc_feature (61)..(62): /note="This region represents a CpG dinucleotide"
  misc_feature (61)..(61): /note="Nucleotide may be methylated to form 5-methylcytosine"
tctgtgtggttgtagcaaggactcagcctcatgtagcacgaataggggtgtggttcatggcgtgttgacccagcagagcactccctcccactaacttgttctgcatgtgtagagtctcccca

SEQ ID NO: 27393 - DNA, 122 bp, Homo sapiens
  misc_feature (61)..(62): /note="This region represents a CpG dinucleotide"
  misc_feature (61)..(61): /note="Nucleotide may be methylated to form 5-methylcytosine"
tgaagttttattggaacacacccacacccgttcattttatgtattgtctatggctgctttcgtgatacggtggcaaagttgaataggggtgacagagactgcattgctcacaaagcctaaaa

SEQ ID NO: 27394 - DNA, 122 bp, Homo sapiens
  misc_feature (61)..(62): /note="This region represents a CpG dinucleotide"
  misc_feature (61)..(61): /note="Nucleotide may be methylated to form 5-methylcytosine"
ttaagagctgtaacactcaccgtgaaggtctgtagcttcacttctgagccaacgagaccacgaacccacgggaaggaagaaactctgaacacatctgaacatcgggaggcacagactccaga

SEQ ID NO: 27395 - DNA, 122 bp, Homo sapiens
  misc_feature (61)..(62): /note="This region represents a CpG dinucleotide"
  misc_feature (61)..(61): /note="Nucleotide may be methylated to form 5-methylcytosine"
tccatttctaacacagctggtttattactgtttgtggcagctcctgcacgaattggtgtccgttaactaagcaatggtattataattacacatttaaattatgtatgggaagggtgtcagtg

SEQ ID NO: 27396 - DNA, 122 bp, Homo sapiens
  misc_feature (61)..(62): /note="This region represents a CpG dinucleotide"
  misc_feature (61)..(61): /note="Nucleotide may be methylated to form 5-methylcytosine"
agatctgaattagaaacattttttcaaattagagcttcaaaatctaatgtgttttggcaccgtctcccaagggcagccagagaaggcctttgaagagctctgtgcagccttggttggagcca

SEQ ID NO: 27397 - DNA, 122 bp, Homo sapiens
  misc_feature (61)..(62): /note="This region represents a CpG dinucleotide"
  misc_feature (61)..(61): /note="Nucleotide may be methylated to form 5-methylcytosine"
gaggctacactgtgcagtttcagggaaagacaaaaggctggattcagtctgaactcagcccgcacatgaagcagctgctcaactagctggagctccaggccagctcttgggctcccaggtca

SEQ ID NO: 27398 - DNA, 122 bp, Homo sapiens
  misc_feature (61)..(62): /note="This region represents a CpG dinucleotide"
  misc_feature (61)..(61): /note="Nucleotide may be methylated to form 5-methylcytosine"
ctaatcatgtccattcatatattcaacaaatactcagcacctattataatattctgagcacgttgctagtgattaaagaagttatcagacagattcatatttaaagagataaaaaccaaaaa

SEQ ID NO: 27399 - DNA, 122 bp, Homo sapiens
  misc_feature (61)..(62): /note="This region represents a CpG dinucleotide"
  misc_feature (61)..(61): /note="Nucleotide may be methylated to form 5-methylcytosine"
tcctcccctagttctcagcctctcctccacctgcctctgcccagcactgtaggcactttccgtgttcagtctgctgaaatcctgtccttggagatcctccacctttgcagctccagcagcct

SEQ ID NO: 27400 - DNA, 122 bp, Homo sapiens
  misc_feature (61)..(62): /note="This region represents a CpG dinucleotide"
  misc_feature (61)..(61): /note="Nucleotide may be methylated to form 5-methylcytosine"
ctcctgcattttagttcaactctggcagcaagaaaacaaaaccacataatctaaggctcacgcccaactctccgaagccccatatgtgctagttcctgtgtggtttgcctacagactgcagg

SEQ ID NO: 27401 - DNA, 122 bp, Homo sapiens
  misc_feature (61)..(62): /note="This region represents a CpG dinucleotide"
  misc_feature (61)..(61): /note="Nucleotide may be methylated to form 5-methylcytosine"
aggagacctcaactgtatctgaaacctgctatttcctttaaataagtacacacactcacacgcacatacacagagacacacaaacacatttggatacaaaatattcttaaatgtcaatatga

SEQ ID NO: 27402 - DNA, 122 bp, Homo sapiens
  misc_feature (61)..(62): /note="This region represents a CpG dinucleotide"
  misc_feature (61)..(61): /note="Nucleotide may be methylated to form 5-methylcytosine"
tctccgccaggtccattctcctttctccactctggaatgccctcctcccaccaaggcccacgccagatggaggtggatgccacacccacaccttaaggttatgttctgcttccccagagaga

SEQ ID NO: 27403 - DNA, 122 bp, Homo sapiens
  misc_feature (61)..(62): /note="This region represents a CpG dinucleotide"
  misc_feature (61)..(61): /note="Nucleotide may be methylated to form 5-methylcytosine"
gccgtcataacagggttctccacaacacttgtgcaacctgtcactaaaaagtgttttatgcgctctaatggacatggcttagggctacaggctgacgagtgttttcacagactcttctgtct

SEQ ID NO: 27404 - DNA, 122 bp, Homo sapiens
  misc_feature (61)..(62): /note="This region represents a CpG dinucleotide"
  misc_feature (61)..(61): /note="Nucleotide may be methylated to form 5-methylcytosine"
tgcactgagcagaaatagagggcatgacatgaagactcaccagcaacactgtgacagagacggttctggggtcagctccaagcccactgcgcatacatcatggacaagagcacgttcacacg

SEQ ID NO: 27405 - DNA, 122 bp, Homo sapiens
  misc_feature (61)..(62): /note="This region represents a CpG dinucleotide"
  misc_feature (61)..(61): /note="Nucleotide may be methylated to form 5-methylcytosine"
gccgtgtcacagtgagctgcaccttgctctgtcccccgcagagtagatgatgtggtgggccggcagggcaccccaaaccacgaccataaatagcctgggggaggagtggggtgagggacctt

SEQ ID NO: 27406 - DNA, 122 bp, Homo sapiens
  misc_feature (61)..(62): /note="This region represents a CpG dinucleotide"
  misc_feature (61)..(61): /note="Nucleotide may be methylated to form 5-methylcytosine"
aaagagctctagcccagtaacatttttaaaacctgaaattagtcatgcatagcataacgacgtttcactcaacgacagaccacatgacagtaatcccgtaagattataatgctgtattatta

SEQ ID NO: 27407 - DNA, 122 bp, Homo sapiens
  misc_feature (61)..(62): /note="This region represents a CpG dinucleotide"
  misc_feature (61)..(61): /note="Nucleotide may be methylated to form 5-methylcytosine"
caacctctgtctgccaggttcaagtgatcttgtgcctcttgtgcctattgggactacaggcgtgcaccaccacgcccggctaattctttttttttttttttagtagagatggggtttctcta

SEQ ID NO: 27408 - DNA, 122 bp, Homo sapiens
  misc_feature (61)..(62): /note="This region represents a CpG dinucleotide"
  misc_feature (61)..(61): /note="Nucleotide may be methylated to form 5-methylcytosine"
tcctgttattgtttttggttttgcccttggccttctgttttgttaggtcttatttctgaacgaaaggctgctaacccacagaatttacttttgaaagaagtgaacgatttctttctccttct

SEQ ID NO: 27409 - DNA, 122 bp, Homo sapiens
  misc_feature (61)..(62): /note="This region represents a CpG dinucleotide"
  misc_feature (61)..(61): /note="Nucleotide may be methylated to form 5-methylcytosine"
agaacaaagaggggatatgggaactgacttaaacgtccccaagcagtggactcctactaacggaataacttacatcactttgtctcatttcctccccgcgggtttcattgtagtttaaagac

SEQ ID NO: 27410 - DNA, 122 bp, Homo sapiens
  misc_feature (61)..(62): /note="This region represents a CpG dinucleotide"
  misc_feature (61)..(61): /note="Nucleotide may be methylated to form 5-methylcytosine"
ggtacgtacaccttcagctgaattaggaaagggaattacagtggatcctggagcccacttcggtttgaatcctggctccataatttcccccagaggatcttgggtaagtgatttaatggtct

SEQ ID NO: 27411 - DNA, 122 bp, Homo sapiens
  misc_feature (61)..(62): /note="This region represents a CpG dinucleotide"
  misc_feature (61)..(61): /note="Nucleotide may be methylated to form 5-methylcytosine"
tattgagtccatctctgactcattattagccaacactttgtgtctggctggcagcttttccgtaagtggtaaggtcagcctcatacagtattgcacagcctttcccattccttttgcgtcag

SEQ ID NO: 27412 - DNA, 122 bp, Homo sapiens
  misc_feature (61)..(62): /note="This region represents a CpG dinucleotide"
  misc_feature (61)..(61): /note="Nucleotide may be methylated to form 5-methylcytosine"
tcctctgtgttttccattctctttctctttgttcttgtatatttatactgttctttcccccgtgctgtcattctattggcattttgagagggtggggtaaaacatatgcattctatcttcca

SEQ ID NO: 27413 - DNA, 122 bp, Homo sapiens
  misc_feature (61)..(62): /note="This region represents a CpG dinucleotide"
  misc_feature (61)..(61): /note="Nucleotide may be methylated to form 5-methylcytosine"
aaccctaatataaatggagtgggcgttcccactagctatgggtcacccccttcgaaagcacgcctccagccatcagtgctgacttcctgtgtcatcgtgagatgactcaggatcctagagca

SEQ ID NO: 27414 - DNA, 122 bp, Homo sapiens
  misc_feature (61)..(62): /note="This region represents a CpG dinucleotide"
  misc_feature (61)..(61): /note="Nucleotide may be methylated to form 5-methylcytosine"
cttcctccagcccctgacacccactagtctactttttgtctctatggattagccttttatcgacattttatctaaatggaatcatacaatatgtggtcttttgagatttctttcaacttagc

SEQ ID NO: 27415 - DNA, 122 bp, Homo sapiens
  misc_feature (61)..(62): /note="This region represents a CpG dinucleotide"
  misc_feature (61)..(61): /note="Nucleotide may be methylated to form 5-methylcytosine"
tcctcatcagccatatttgtggtccttattcctgttgctgcctctgaggccctgtctctacgtaatgagtccttatgaggtttgcttgagcaaatagttataaaacacttagaacagtggct

SEQ ID NO: 27416 - DNA, 122 bp, Homo sapiens
  misc_feature (61)..(62): /note="This region represents a CpG dinucleotide"
  misc_feature (61)..(61): /note="Nucleotide may be methylated to form 5-methylcytosine"
gggttccttccagcccaggcaaagcagaattattatgcaaagagagacatgccagaatcacgtgctacacattacaggtaggcgaatgagagtaaattatcttgttttctacaaatcatcct

SEQ ID NO: 27417 - DNA, 122 bp, Homo sapiens
  misc_feature (61)..(62): /note="This region represents a CpG dinucleotide"
  misc_feature (61)..(61): /note="Nucleotide may be methylated to form 5-methylcytosine"
caggacttcctttctcaggattgcaaacataagactatttgagctttcacttttgaaaagcggttactaatacctatactctgggaaagggctaatgcagatagaagactgtggtcactgca

SEQ ID NO: 27418 - DNA, 122 bp, Homo sapiens
  misc_feature (61)..(62): /note="This region represents a CpG dinucleotide"
  misc_feature (61)..(61): /note="Nucleotide may be methylated to form 5-methylcytosine"
gttgtgtgggcaggccgtctcttatctcaacattctggattcccgagctccccctctacccggcccacctacctggcggccttcacaggcctttaatgccttctccaactcgtgccggatac

SEQ ID NO: 27419 - DNA, 122 bp, Homo sapiens
  misc_feature (61)..(62): /note="This region represents a CpG dinucleotide"
  misc_feature (61)..(61): /note="Nucleotide may be methylated to form 5-methylcytosine"
gttacatcagtacaatttcttgcatccttccctgaggccaagagagccccccagtctgtgcggaatggaatggaagagctcccttgtatacgttatttccttttgttttcacaagaccttgt

SEQ ID NO: 27420 - DNA, 122 bp, Homo sapiens
  misc_feature (61)..(62): /note="This region represents a CpG dinucleotide"
  misc_feature (61)..(61): /note="Nucleotide may be methylated to form 5-methylcytosine"
taaatgacctggcaaattttgattttagagattgtattttacattctaaagcctccacttcgtttatttttatagttttttggtttatgtttgtctactattattttgaatatatttttatt

SEQ ID NO: 27421 - DNA, 122 bp, Homo sapiens
  misc_feature (61)..(62): /note="This region represents a CpG dinucleotide"
  misc_feature (61)..(61): /note="Nucleotide may be methylated to form 5-methylcytosine"
gaggagggaatccagacggagatgaccgttagcaacacacagcaagtcttggactaaaggcgtgtagtaggatctgagacaccactgaagtagatttggtgactaatttttttttttttttt

SEQ ID NO: 27422 - DNA, 122 bp, Homo sapiens
  misc_feature (61)..(62): /note="This region represents a CpG dinucleotide"
  misc_feature (61)..(61): /note="Nucleotide may be methylated to form 5-methylcytosine"
cgcggcctctgctgctcaccaccagcacatacctggcccaggagtggctgccagtcaatgcgcagcagccctttgcaggacctgcccttgggctgcttttgagtttctgagcatccaagtct

SEQ ID NO: 27423 - DNA, 122 bp, Homo sapiens
  misc_feature (61)..(62): /note="This region represents a CpG dinucleotide"
  misc_feature (61)..(61): /note="Nucleotide may be methylated to form 5-methylcytosine"
taaacctgaggttttacggagcgacgcaacatgcacggtgccatctccagtgatgcttaacggtgcatccgggatatgaaaagatgacactgcaaattcccacaaacatcatgcagaattca

SEQ ID NO: 27424 - DNA, 122 bp, Homo sapiens
  misc_feature (61)..(62): /note="This region represents a CpG dinucleotide"
  misc_feature (61)..(61): /note="Nucleotide may be methylated to form 5-methylcytosine"
ccgcctgatctttgacaacctgaagaaatccatcatgtacaccctgaccagcaacatccccgagatcacgcccttcctgatgttcatcatcctcggtatacccctgcctctgggaaccataa

SEQ ID NO: 27425 - DNA, 122 bp, Homo sapiens
  misc_feature (61)..(62): /note="This region represents a CpG dinucleotide"
  misc_feature (61)..(61): /note="Nucleotide may be methylated to form 5-methylcytosine"
catccatacttttaaccactatgctgtgctctctctcatcatgagtcatgacgatgatcacgttagattgtgttagatgatgttagatcatgagtcatgatctaacatctagcaacccatca

SEQ ID NO: 27426 - DNA, 122 bp, Homo sapiens
  misc_feature (61)..(62): /note="This region represents a CpG dinucleotide"
  misc_feature (61)..(61): /note="Nucleotide may be methylated to form 5-methylcytosine"
caagacccagaaaaggcccctgggtggaacctttgtccccaggacaaagttgctttggggcgcttacaggttgaatcacccatagctatgttttgtttggcttgtactgtgttgtttacatt

SEQ ID NO: 27427 - DNA, 122 bp, Homo sapiens
  misc_feature (61)..(62): /note="This region represents a CpG dinucleotide"
  misc_feature (61)..(61): /note="Nucleotide may be methylated to form 5-methylcytosine"
tagggaaaacacagcaaggcatttggcccagaaaaggcacctgaggaccttgaattagagcggccactcctcatgtgtccttgttcatgaggaacatagagctaaaatcaataaaaatcaca

SEQ ID NO: 27428 - DNA, 122 bp, Homo sapiens
  misc_feature (61)..(62): /note="This region represents a CpG dinucleotide"
  misc_feature (61)..(61): /note="Nucleotide may be methylated to form 5-methylcytosine"
ccgtaaaatgggcatagtaagaatatgtacttcatggggtgttggacaggtaaactgaggcgaatgcatctgagtcataatgggtgatgtgtattgaatgcaagctgcctgccaagccttgg

SEQ ID NO: 27429 - DNA, 122 bp, Homo sapiens
  misc_feature (61)..(62): /note="This region represents a CpG dinucleotide"
  misc_feature (61)..(61): /note="Nucleotide may be methylated to form 5-methylcytosine"
agagccgtaagactcctcacactgtgacctggccacatcctacatacatgtcagcttgcacgccatctacttaactgtcatgcacttgatagcaaatgagcttttgccctttctgctgcctt

SEQ ID NO: 27430 - DNA, 122 bp, Homo sapiens
  misc_feature (61)..(62): /note="This region represents a CpG dinucleotide"
  misc_feature (61)..(61): /note="Nucleotide may be methylated to form 5-methylcytosine"
gcaggggtggattgtaacaccctcatccatttccccagtgccagatggaccaggaggtggcgtagggtgggagacaggaaggactcagcatctgggacaagctgggagattaccacagggtg

SEQ ID NO: 27431 - DNA, 122 bp, Homo sapiens
  misc_feature (61)..(62): /note="This region represents a CpG dinucleotide"
  misc_feature (61)..(61): /note="Nucleotide may be methylated to form 5-methylcytosine"
ggcctcccaatcgggtgttcccttgaggtcatggtgctgagtgttactcagtctgacagacgagacactgtaggctcaccaaggctaagaaatgtgcagtcagctgggaggggctggacccg

SEQ ID NO: 27432 - DNA, 122 bp, Homo sapiens
  misc_feature (61)..(62): /note="This region represents a CpG dinucleotide"
  misc_feature (61)..(61): /note="Nucleotide may be methylated to form 5-methylcytosine"
ggagagtctctgacacatttctagagctttgaaaaactcacagattctatgctgtcatcccgttgggcctaatgggtaaatggctctagagagtgacagattgctgacagcagggtttgagt

SEQ ID NO: 27433 - DNA, 122 bp, Homo sapiens
  misc_feature (61)..(62): /note="This region represents a CpG dinucleotide"
  misc_feature (61)..(61): /note="Nucleotide may be methylated to form 5-methylcytosine"
ggaaacacagcctcaggccagaagccagaaaactgcactttgaagttcagagggataagacggatttatgctgaataggtggcgcaatatacatattcagtaagctgtaggaggagttatga

SEQ ID NO: 27434 - DNA, 122 bp, Homo sapiens
  misc_feature (61)..(62): /note="This region represents a CpG dinucleotide"
  misc_feature (61)..(61): /note="Nucleotide may be methylated to form 5-methylcytosine"
tggttttttagaggaaatgaaataccaaaaggatatgactgaaagtggattgaagaatcacgggactgcaagtcaaagaacttacattgttattgtcatgctacacaagcactaggtataag

SEQ ID NO: 27435 - DNA, 122 bp, Homo sapiens
  misc_feature (61)..(62): /note="This region represents a CpG dinucleotide"
  misc_feature (61)..(61): /note="Nucleotide may be methylated to form 5-methylcytosine"
caagtatcaatcaaaactacatgccaacgtccactccttggaaataattaaatgacatgacgtgcctgattttttcagctggtgatgcactgtaatttgcatctgctgaaggaatttatctt

SEQ ID NO: 27436 - DNA, 122 bp, Homo sapiens
  misc_feature (61)..(62): /note="This region represents a CpG dinucleotide"
  misc_feature (61)..(61): /note="Nucleotide may be methylated to form 5-methylcytosine"
tcatcctaccagaatgtggcagagccaggattagaacctaggtctgtcccagaggacatccgattctctctgaggcaacctgagatgtaatccagaagcttctctgatggcagagccctgac

SEQ ID NO: 27437 - DNA, 122 bp, Homo sapiens
  misc_feature (61)..(62): /note="This region represents a CpG dinucleotide"
  misc_feature (61)..(61): /note="Nucleotide may be methylated to form 5-methylcytosine"
tttcttgagatggagtctcctggtgaagtttttgtgaacattgatgataacaaaggacttcgcatagcacatcaacttagttgattaagcagtagcagggtttgagaggattgactccaatt

SEQ ID NO: 27438 - DNA, 122 bp, Homo sapiens
  misc_feature (61)..(62): /note="This region represents a CpG dinucleotide"
  misc_feature (61)..(61): /note="Nucleotide may be methylated to form 5-methylcytosine"
cctcctcagcccctccgggaccctccccacaccacaccctgagtaggatggggtcgtgaacggccccagcaccaggagcgacccacacccctgcagagtccagcagccactcggccgcctct

SEQ ID NO: 27439 - DNA, 122 bp, Homo sapiens
  misc_feature (61)..(62): /note="This region represents a CpG dinucleotide"
  misc_feature (61)..(61): /note="Nucleotide may be methylated to form 5-methylcytosine"
gcattgggattacaggagtgagctattgtgctgggccataataactttaataactactttcgacaatgttaaaaagtccgagttcaagtccctgcaaatttcaagaggcatcctctatttcc

SEQ ID NO: 27440 - DNA, 122 bp, Homo sapiens
  misc_feature (61)..(62): /note="This region represents a CpG dinucleotide"
  misc_feature (61)..(61): /note="Nucleotide may be methylated to form 5-methylcytosine"
ggttcgaactcaacctcttcattcttggcttgttataagacaccatggcaacagagaatacgtaggacatgtttctgccctcagggaggttgcagagggtggaggagacaaaacatccacag

SEQ ID NO: 27441 - DNA, 122 bp, Homo sapiens
  misc_feature (61)..(62): /note="This region represents a CpG dinucleotide"
  misc_feature (61)..(61): /note="Nucleotide may be methylated to form 5-methylcytosine"
aggtggcaagcagggggttacacccacagccccgtccactgacaccttcagactcaagagcgagtgccaccgccctaaacggaaagacactcatcacggcagcatctttcaagtgaacagaa

SEQ ID NO: 27442 - DNA, 122 bp, Homo sapiens
  misc_feature (61)..(62): /note="This region represents a CpG dinucleotide"
  misc_feature (61)..(61): /note="Nucleotide may be methylated to form 5-methylcytosine"
atcttcctgggctggtgacatgtgatccgattctgtcgcagtgctgggcactagggcagccgcagctcctagttagccacgtgatcatgaagagggaacaaatactctacagtgggccctgc

SEQ ID NO: 27443 - DNA, 122 bp, Homo sapiens
  misc_feature (61)..(62): /note="This region represents a CpG dinucleotide"
  misc_feature (61)..(61): /note="Nucleotide may be methylated to form 5-methylcytosine"
tctagagctgggaagtagaagatcaaggccccagcaggggcccattcctcatagatgatgcgtcctctatgttgctgcatcctcccatgatgaaagggcaaaagaggtgaacaactctctca

SEQ ID NO: 27444 - DNA, 122 bp, Homo sapiens
  misc_feature (61)..(62): /note="This region represents a CpG dinucleotide"
  misc_feature (61)..(61): /note="Nucleotide may be methylated to form 5-methylcytosine"
tcaaaggctgaacaaggcaggaaagagcagcaggccagtgtggctggaacacagcgagcacgggccaatgtgatcagagaggaaccaggtaacctagagctgcagggcttggtaagccacag

SEQ ID NO: 27445 - DNA, 122 bp, Homo sapiens
  misc_feature (61)..(62): /note="This region represents a CpG dinucleotide"
  misc_feature (61)..(61): /note="Nucleotide may be methylated to form 5-methylcytosine"
gcatataccaaaactcttgtaacactgggtatagtgactcacctctgtaatctagcacttcgtgaggacaaagtgggaggatggcttgaggccaggaggttgagaacagcctgggcaacata

SEQ ID NO: 27446 - DNA, 122 bp, Homo sapiens
  misc_feature (61)..(62): /note="This region represents a CpG dinucleotide"
  misc_feature (61)..(61): /note="Nucleotide may be methylated to form 5-methylcytosine"
attcggtgctcacactagctaaccagctcatggagactgagttagacctcttagaaaacacgcccacacacataacctctctctttacttcactgctgtggaatcccttccataaccacaag

SEQ ID NO: 27447 - DNA, 122 bp, Homo sapiens
  misc_feature (61)..(62): /note="This region represents a CpG dinucleotide"
  misc_feature (61)..(61): /note="Nucleotide may be methylated to form 5-methylcytosine"
taagcttctcttgtagatacacacagaaatatacacacatacagtggctaaaattctacccgtagagaacggtttccaaaagcagaatgaggaacttccttgggttaaaatagcaacagtga

SEQ ID NO: 27448 - DNA, 122 bp, Homo sapiens
  misc_feature (61)..(62): /note="This region represents a CpG dinucleotide"
  misc_feature (61)..(61): /note="Nucleotide may be methylated to form 5-methylcytosine"
caagtgagagtaatgacgtgagctaatccaatttgaagtataaacaaagaaatttcttcacgcaaagagactgacttattttgtttcagaactaaataccacgcagtagaggttaggtcagg

SEQ ID NO: 27449 - DNA, 122 bp, Homo sapiens
  misc_feature (61)..(62): /note="This region represents a CpG dinucleotide"
  misc_feature (61)..(61): /note="Nucleotide may be methylated to form 5-methylcytosine"
taactcctttgagaccagatacagtcatgggactatattctcaaaaagggaatgtgaatacggtacaactcctggatcctttgcttaaaatgaaactgatgctctgaatctggtttctctta

SEQ ID NO: 27450 - DNA, 122 bp, Homo sapiens
  misc_feature (61)..(62): /note="This region represents a CpG dinucleotide"
  misc_feature (61)..(61): /note="Nucleotide may be methylated to form 5-methylcytosine"
catttttcaaaccaattcaaatattgccttaagatacactagctgggggtgaagaaatggcggtgagtaacaagtgatcaagacaggaccaggcccactcaggcagactgagaattctggtc

SEQ ID NO: 27451 - DNA, 122 bp, Homo sapiens
  misc_feature (61)..(62): /note="This region represents a CpG dinucleotide"
  misc_feature (61)..(61): /note="Nucleotide may be methylated to form 5-methylcytosine"
tgccaagttgcactgccgggaaccccaaggagaaagtaggagttagtcagtgcgggaagacgcaagcacttgtgtctcaacacgcgcagggcgcggctgcagatggaaaaaccgggaagctc

SEQ ID NO: 27452 - DNA, 122 bp, Homo sapiens
  misc_feature (61)..(62): /note="This region represents a CpG dinucleotide"
  misc_feature (61)..(61): /note="Nucleotide may be methylated to form 5-methylcytosine"
gggattcactttcagatgagttgataagactgggaggatacattcatggggctgggaacacgtataatatgtgaatatgtgtgatgagtaatactaactaggcttgttagtgatggttctgt

SEQ ID NO: 27453 - DNA, 122 bp, Homo sapiens
  misc_feature (61)..(62): /note="This region represents a CpG dinucleotide"
  misc_feature (61)..(61): /note="Nucleotide may be methylated to form 5-methylcytosine"
ttagaactgtaaattggatgtccttggcagccttactcattcgtgagcattctaaactatcgtcatgtaacaggaagtctgagaatgaacaaagagaagggaacctaaagacagctctgtcc

SEQ ID NO: 27454 - DNA, 122 bp, Homo sapiens
  misc_feature (61)..(62): /note="This region represents a CpG dinucleotide"
  misc_feature (61)..(61): /note="Nucleotide may be methylated to form 5-methylcytosine"
gaggcctgtattgttaaaggcattttcacttccttttctgtgtgcaggaaatcctcatgccggtaattactagctagtaacattgctcctgcaacgtggagcagttggcctattgtacatgc

SEQ ID NO: 27455 - DNA, 122 bp, Homo sapiens
  misc_feature (61)..(62): /note="This region represents a CpG dinucleotide"
  misc_feature (61)..(61): /note="Nucleotide may be methylated to form 5-methylcytosine"
atctttcattagaccccaaaccacctctaggataaagcaaacagggccctgccccacccacgcactagcagctgggcaggattagggtaggccttctagaacagtactgctgctgagaggct

SEQ ID NO: 27456 - DNA, 122 bp, Homo sapiens
  misc_feature (61)..(62): /note="This region represents a CpG dinucleotide"
  misc_feature (61)..(61): /note="Nucleotide may be methylated to form 5-methylcytosine"
gcctttggctgggagaccctggccagagatcagaagatcaaaggatgagaagatcaggggcgaggcaggtggcactcacttggaggcaccagagagaagcggcagctgctgcctcctaaggg

SEQ ID NO: 27457 - DNA, 122 bp, Homo sapiens
  misc_feature (61)..(62): /note="This region represents a CpG dinucleotide"
  misc_feature (61)..(61): /note="Nucleotide may be methylated to form 5-methylcytosine"
atttggcacccttcctctgacctcctgtgggatctacgctccccagggtcccttgtcctccggcatcagggtaattttaaccaatgggaagcatgtgagcaagactacaagggagaagccag

SEQ ID NO: 27458 - DNA, 122 bp, Homo sapiens
  misc_feature (61)..(62): /note="This region represents a CpG dinucleotide"
  misc_feature (61)..(61): /note="Nucleotide may be methylated to form 5-methylcytosine"
agggctttcccggtgtcacctcctgccctggcctgggaagtgtcgtggggacagctgctccggagactcctggctgccaggcttgacttgggcttgattgatttagcctgttacctggaaag

SEQ ID NO: 27459 - DNA, 122 bp, Homo sapiens
  misc_feature (61)..(62): /note="This region represents a CpG dinucleotide"
  misc_feature (61)..(61): /note="Nucleotide may be methylated to form 5-methylcytosine"
gggcaatactgattgcatggtggccctgggagctgtgccactcttgaaggtcctgcctggcgttaatatttggatatattttcaaagagggagaatcctcttctgtattagtaataggcatg

SEQ ID NO: 27460 - DNA, 122 bp, Homo sapiens
  misc_feature (61)..(62): /note="This region represents a CpG dinucleotide"
  misc_feature (61)..(61): /note="Nucleotide may be methylated to form 5-methylcytosine"
tttacacttgctgttcccttggcttgaaatgttcctctcagacattggctccttcctccccgtcaagtccttcaggtcttggctccaatgtcaccttttcagcaatgccatcctaaccaaac

SEQ ID NO: 27461 - DNA, 122 bp, Homo sapiens
  misc_feature (61)..(62): /note="This region represents a CpG dinucleotide"
  misc_feature (61)..(61): /note="Nucleotide may be methylated to form 5-methylcytosine"
gaaacccagacagcgttactgacctggttggcggaggtcaccgcgggcgccaggcgtgcgcgggagctggagcttaacacccagccgctgtcccgcaaaagactttcccggatctgctcacc

SEQ ID NO: 27462 - DNA, 122 bp, Homo sapiens
  misc_feature (61)..(62): /note="This region represents a CpG dinucleotide"
  misc_feature (61)..(61): /note="Nucleotide may be methylated to form 5-methylcytosine"
tgacctcttgccttaaccagccccactcctacttccacatcaaaacggcattagctctctcgcagggaaaggcttagctacttcataagggccaccaaaatactgcccaagaaagggagagg

SEQ ID NO: 27463 - DNA, 122 bp, Homo sapiens
  misc_feature (61)..(62): /note="This region represents a CpG dinucleotide"
  misc_feature (61)..(61): /note="Nucleotide may be methylated to form 5-methylcytosine"
aggacttccaggaagcgctggcaaccctgaggacgaagaagcggactgtgtgccttgtagcgctgggattcttgtccatgtgtctaaacaggttttgctgggctctgactcccagcaggcca

SEQ ID NO: 27464 - DNA, 122 bp, Homo sapiens
  misc_feature (61)..(62): /note="This region represents a CpG dinucleotide"
  misc_feature (61)..(61): /note="Nucleotide may be methylated to form 5-methylcytosine"
aagaggaatgtagaagaaaattacagggccaactctgtatgagtctcctggtgcccgactcgacacgtgagactgagtcatcggtccaggaggaggtggcccgctcaggccatgcggtcact

SEQ ID NO: 27465 - DNA, 122 bp, Homo sapiens
  misc_feature (61)..(62): /note="This region represents a CpG dinucleotide"
  misc_feature (61)..(61): /note="Nucleotide may be methylated to form 5-methylcytosine"
agccttagaggctgcccacattccttggctcatggcctcttctccactgaaagccagcagcgttggctctctctgtgcctttcttctagagtcacatttctttctgactacttgactgtctt

SEQ ID NO: 27466 - DNA, 122 bp, Homo sapiens
  misc_feature (61)..(62): /note="This region represents a CpG dinucleotide"
  misc_feature (61)..(61): /note="Nucleotide may be methylated to form 5-methylcytosine"
cggtggacctgggtttacatcaaggctatgcactcaccagctgggagactttggagagatcgcacagtcttgctggtctcagcttccttactcataatttggggatagaaccatgtcccaca

SEQ ID NO: 27467 - DNA, 122 bp, Homo sapiens
  misc_feature (61)..(62): /note="This region represents a CpG dinucleotide"
  misc_feature (61)..(61): /note="Nucleotide may be methylated to form 5-methylcytosine"
ttttggctactttacaactgctgctacagcactatcagcaaaacactctatcactttgaacgaaggcatccaaatggcaaataaaagctttactcacttatctgattaaaatgtttaataaa

SEQ ID NO: 27468 - DNA, 122 bp, Homo sapiens
  misc_feature (61)..(62): /note="This region represents a CpG dinucleotide"
  misc_feature (61)..(61): /note="Nucleotide may be methylated to form 5-methylcytosine"
caggtgcagaagtctcttaataaagggaatcccaccctaccttcttctcacagatgcccacgcacattgctgtgcacaggtgcttgcagagaagttttgtcttcggcagcctcttgttctct

SEQ ID NO: 27469 - DNA, 122 bp, Homo sapiens
  misc_feature (61)..(62): /note="This region represents a CpG dinucleotide"
  misc_feature (61)..(61): /note="Nucleotide may be methylated to form 5-methylcytosine"
ttatggagacactaatcctgtgggatcacggcccaaacctgatgacttcatttagcctcacgtacttctttacaccaaatacagccacacttgggattaggacttcaacatatgaattttgg

SEQ ID NO: 27470 - DNA, 122 bp, Homo sapiens
  misc_feature (61)..(62): /note="This region represents a CpG dinucleotide"
  misc_feature (61)..(61): /note="Nucleotide may be methylated to form 5-methylcytosine"
aaattggaataacaagaaaggacgacatggacatttttattgtaagtcaactttgagccacgtagagttcaagcaaggtaacatttgaaagaggcttagacatcatttggcccatccccttc

SEQ ID NO: 27471 - DNA, 122 bp, Homo sapiens
  misc_feature (61)..(62): /note="This region represents a CpG dinucleotide"
  misc_feature (61)..(61): /note="Nucleotide may be methylated to form 5-methylcytosine"
acaagctagtggcagagctgctgactgcctaccacctgctgtttctctaagttgccttggcgactgcctcagggactgcccatagcatgcaatctctctaagttatcccttcccctccattt

SEQ ID NO: 27472 - DNA, 122 bp, Homo sapiens
  misc_feature (61)..(62): /note="This region represents a CpG dinucleotide"
  misc_feature (61)..(61): /note="Nucleotide may be methylated to form 5-methylcytosine"
tgtaagtattaactcattcagtctcccatgtggtaggcactatcattaccatttgacaggcgaggaaaatgaggaactgaaacgttaagtaacctgcccaaggtcacaaagcttttacttaa

SEQ ID NO: 27473 - DNA, 122 bp, Homo sapiens
  misc_feature (61)..(62): /note="This region represents a CpG dinucleotide"
  misc_feature (61)..(61): /note="Nucleotide may be methylated to form 5-methylcytosine"
tacaaaatccctgtggttacgataatatcacacacttcagaaaccaaggctctctggcagcgagggcacagagtggaacctcagtcagtagttattaacttggctattctggatatatattt

SEQ ID NO: 27474 - DNA, 122 bp, Homo sapiens
  misc_feature (61)..(62): /note="This region represents a CpG dinucleotide"
  misc_feature (61)..(61): /note="Nucleotide may be methylated to form 5-methylcytosine"
tgacttcaatgtgggtttttaatcttctgcccaagtgttatcttacttgcccagacaagtcgttcaccactacaggagagtgtgggaaaattaacactgccagagcaaccagggaagggacg

SEQ ID NO: 27475 - DNA, 122 bp, Homo sapiens
  misc_feature (61)..(62): /note="This region represents a CpG dinucleotide"
  misc_feature (61)..(61): /note="Nucleotide may be methylated to form 5-methylcytosine"
gcagaatggcgtgggagttctgggaagggggcgctggctaggcccttcctgggacactcacgcagccacattcccaaaccccctcccgggcccccaaattcctggctcggtagtgatacagc

SEQ ID NO: 27476 - DNA, 122 bp, Homo sapiens
  misc_feature (61)..(62): /note="This region represents a CpG dinucleotide"
  misc_feature (61)..(61): /note="Nucleotide may be methylated to form 5-methylcytosine"
tcaatacggatggacactcctccaacatggtgtatcccatggggaagcgcgacgtgggcgcggccatgttccccacctgaccacgccgccgaggggtaccgaacgtcccaaagcacccactt

SEQ ID NO: 27477 - DNA, 122 bp, Homo sapiens
  misc_feature (61)..(62): /note="This region represents a CpG dinucleotide"
  misc_feature (61)..(61): /note="Nucleotide may be methylated to form 5-methylcytosine"
ggaacattcaaatataatgatttacatccttccccaactcccttccagtgtgggtcagggcgaacatggaccatggacgtgactggagccaggggtgcatgccctctctgggctccctcttg

SEQ ID NO: 27478 - DNA, 122 bp, Homo sapiens
  misc_feature (61)..(62): /note="This region represents a CpG dinucleotide"
  misc_feature (61)..(61): /note="Nucleotide may be methylated to form 5-methylcytosine"
agtagcacagtgaacatagagcatacagacaactttctagacagacagcaagaaacaaaacgtgtgggggcccatcctgctctcctgctttctgtggagtgacacatcagttgtctttgggg

SEQ ID NO: 27479 - DNA, 122 bp, Homo sapiens
  misc_feature (61)..(62): /note="This region represents a CpG dinucleotide"
  misc_feature (61)..(61): /note="Nucleotide may be methylated to form 5-methylcytosine"
ctgccacgtccgaggcctctgttccaggcaaggtggggcagggaggggatatagggcagacggcctgttttcaaagacttccaatccagctgggaaggtaagacctgctcccagaagtcaaa

SEQ ID NO: 27480 - DNA, 122 bp, Homo sapiens
  misc_feature (61)..(62): /note="This region represents a CpG dinucleotide"
  misc_feature (61)..(61): /note="Nucleotide may be methylated to form 5-methylcytosine"
atgtcagaaggatctggtagtgagtgcctgtggcttgttagcaatgggactcagagtaggcgtcttcagttctatgagactcagtgttctctgtaaaatggagatgatagtcgcccccgagc

SEQ ID NO: 27481 - DNA, 122 bp, Homo sapiens
  misc_feature (61)..(62): /note="This region represents a CpG dinucleotide"
  misc_feature (61)..(61): /note="Nucleotide may be methylated to form 5-methylcytosine"
ctgatacccactctccgcattaggtagaaaagagtgtgctcacacaattaaagtacaagacggcatgctcgatttggggcaggacagtgaatagaaaacagaagtcaacatcaccacctcaa

SEQ ID NO: 27482 - DNA, 122 bp, Homo sapiens
  misc_feature (61)..(62): /note="This region represents a CpG dinucleotide"
  misc_feature (61)..(61): /note="Nucleotide may be methylated to form 5-methylcytosine"
tgtctgcctttgtgctcagagaaggccttcacgcctttggttctcgtaaggtgctcgccacggcaacccaagtgtctaagcagggcatttgcaggggactgtccccacctcacaggcggcta

SEQ ID NO: 27483 - DNA, 122 bp, Homo sapiens
  misc_feature (61)..(62): /note="This region represents a CpG dinucleotide"
  misc_feature (61)..(61): /note="Nucleotide may be methylated to form 5-methylcytosine"
ggtattcatttctcataaaaggttgcagtatttcctggacacctgaattctatgtcttcacggcaaaaacaattcaaaatgtcccaaaacattatgcaggaaggagtttttaatttttttta

SEQ ID NO: 27484 - DNA, 122 bp, Homo sapiens
  misc_feature (61)..(62): /note="This region represents a CpG dinucleotide"
  misc_feature (61)..(61): /note="Nucleotide may be methylated to form 5-methylcytosine"
tttgctgtgcgctggtgaccaaactgagttaggaaagacagaacacacacatacgcaacacgtcatagaaagcaggtttattactcacagacaggcaatgagggacaacagaagcctaggat

SEQ ID NO: 27485 - DNA, 122 bp, Homo sapiens
  misc_feature (61)..(62): /note="This region represents a CpG dinucleotide"
  misc_feature (61)..(61): /note="Nucleotide may be methylated to form 5-methylcytosine"
gagatcagttcctgacagctttcctgtttctgattccagtccctttggggacatctgatacgttgtctggccaactctggcctcctttttatgtttatgctggtgtgggtggttttccgagg

SEQ ID NO: 27486 - DNA, 122 bp, Homo sapiens
  misc_feature (61)..(62): /note="This region represents a CpG dinucleotide"
  misc_feature (61)..(61): /note="Nucleotide may be methylated to form 5-methylcytosine"
agaaggtgatgtcatcagggttcagacccaggctctacggctggagtcactgggctatagcggtggtaccatttccaccaagtggccagtagcttatccccactggggtctctcgcctgact

SEQ ID NO: 27487 - DNA, 122 bp, Homo sapiens
  misc_feature (61)..(62): /note="This region represents a CpG dinucleotide"
  misc_feature (61)..(61): /note="Nucleotide may be methylated to form 5-methylcytosine"
attcagtgaatacccagggttaaggctatttacatgcatacttgctaatcctcaccacaacgctgcaaggtagatattcctatctctgtttcacttaggagagaaattatgttcccaaagtt

SEQ ID NO: 27488 - DNA, 122 bp, Homo sapiens
  misc_feature (61)..(62): /note="This region represents a CpG dinucleotide"
  misc_feature (61)..(61): /note="Nucleotide may be methylated to form 5-methylcytosine"
cgaacacgaagagatcactgggcgttttgaggaaaggaacgtcagagtgggtctctgacacggagtgagctgagtgttgcagcctgtctagtcagcagtaactgcttcccacaccacgtgac

SEQ ID NO: 27489 - DNA, 122 bp, Homo sapiens
  misc_feature (61)..(62): /note="This region represents a CpG dinucleotide"
  misc_feature (61)..(61): /note="Nucleotide may be methylated to form 5-methylcytosine"
gcctattctgaggtgtgggctgctgatgggcagctgtgaattaggctccgacaacactgccgtgtgagttgttgaacttggcagtcattcttttggttgacaaataagaatgtggcaattta

SEQ ID NO: 27490 - DNA, 122 bp, Homo sapiens
  misc_feature (61)..(62): /note="This region represents a CpG dinucleotide"
  misc_feature (61)..(61): /note="Nucleotide may be methylated to form 5-methylcytosine"
gcctgcaagcacactgacttccacatccctagcatttaggcctttgaatagaagctgacacgtagcagccagctgaacaagtatttaatgaggagcaacacaactccaagaagggctcctta

SEQ ID NO: 27491 - DNA, 122 bp, Homo sapiens
  misc_feature (61)..(62): /note="This region represents a CpG dinucleotide"
  misc_feature (61)..(61): /note="Nucleotide may be methylated to form 5-methylcytosine"
gcccagagtggcggccctttcctctcctacagacacagaagaagttccatgtgcagaatgcggctgtacataggctacgttctgtcttcgagggggaaaggctgctgaggctgggggacctg

SEQ ID NO: 27492 - DNA, 122 bp, Homo sapiens
  misc_feature (61)..(62): /note="This region represents a CpG dinucleotide"
  misc_feature (61)..(61): /note="Nucleotide may be methylated to form 5-methylcytosine"
ccccttctggcttccagactgcgggcccagccacagccgtggagactaggcaggggcaggcgcctggggctccgcgaatgcagcatatatcctgctgatggcctaaggaacatacgctatga

SEQ ID NO: 27493 - DNA, 122 bp, Homo sapiens
  misc_feature (61)..(62): /note="This region represents a CpG dinucleotide"
  misc_feature (61)..(61): /note="Nucleotide may be methylated to form 5-methylcytosine"
gaagattggggttgtatttatttcaattgaatgctataggaaaagatgatcccaaaagtgcgttccctgatggacataggaacattagggtgtcatcagtattcataaccttggaatgactc

SEQ ID NO: 27494 - DNA, 122 bp, Homo sapiens
  misc_feature (61)..(62): /note="This region represents a CpG dinucleotide"
  misc_feature (61)..(61): /note="Nucleotide may be methylated to form 5-methylcytosine"
agaatgtctacatcaactgtcagctgtggttttcagaggaagtggattagggaggacttccgctttctaattcagagttctatagtgcttgcagtttttatgtgatgtggatcatactttgg

SEQ ID NO: 27495 - DNA, 122 bp, Homo sapiens
  misc_feature (61)..(62): /note="This region represents a CpG dinucleotide"
  misc_feature (61)..(61): /note="Nucleotide may be methylated to form 5-methylcytosine"
ccaggtgtgacacacacagctgttagtgctgaaaacagccttagcctgctctctgttcagcggtgatccagtgtgtcaattctaatttattgtagtccaaagtgttggtgttttcctgtgct

SEQ ID NO: 27496 - DNA, 122 bp, Homo sapiens
  misc_feature (61)..(62): /note="This region represents a CpG dinucleotide"
  misc_feature (61)..(61): /note="Nucleotide may be methylated to form 5-methylcytosine"
aacctgggaatgccagagcccctgtggactgtgaagcagtgagcagactgtactcacagacgcctcgcagagccggtagaagtcaacgctcaggtatgctctgatgccgtctatggctccag

SEQ ID NO: 27497 - DNA, 122 bp, Homo sapiens
  misc_feature (61)..(62): /note="This region represents a CpG dinucleotide"
  misc_feature (61)..(61): /note="Nucleotide may be methylated to form 5-methylcytosine"
ctctctcttacaaacaaatctgccttttccagatactaaatctaacgagatgacacactacgttctcttgtcaaatacaagtgttgtggattttaatcttaatgtttagcctcaaataatgt

SEQ ID NO: 27498 - DNA, 122 bp, Homo sapiens
  misc_feature (61)..(62): /note="This region represents a CpG dinucleotide"
  misc_feature (61)..(61): /note="Nucleotide may be methylated to form 5-methylcytosine"
aggaagtagttggcaacttgccctgaaatctagaggttcacaatctgctgacatggactccgccactccagctccctgcttcgacaccatgggcagagtgaccagagtgtgctacctcatct

SEQ ID NO: 27499 - DNA, 122 bp, Homo sapiens
  misc_feature (61)..(62): /note="This region represents a CpG dinucleotide"
  misc_feature (61)..(61): /note="Nucleotide may be methylated to form 5-methylcytosine"
ctcccagctttccattggctgaaccaacctggaagccagagagcaagggagcctgggaaacgcagttctctgtgatatagcacaaaggctcagaaaggcagagaattactccgagaggaaaa

SEQ ID NO: 27500 - DNA, 122 bp, Homo sapiens
  misc_feature (61)..(62): /note="This region represents a CpG dinucleotide"
  misc_feature (61)..(61): /note="Nucleotide may be methylated to form 5-methylcytosine"
tgaatagtaatttgacaggacccagaagagagagcatgagtgatgggattataataaatgcgggagaggatgcttaataaactttggtgaagccctggatcctgcacttttcctctcctacc

SEQ ID NO: 27501 - DNA, 122 bp, Homo sapiens
  misc_feature (61)..(62): /note="This region represents a CpG dinucleotide"
  misc_feature (61)..(61): /note="Nucleotide may be methylated to form 5-methylcytosine"
agtggatgctgctgggccccaggtatgtccccatctcgcccggctggcacaccaggatgccgtgggaagcctcctcgctgtgccccttcggtctggggaacagagactgtgccacgatgagc

SEQ ID NO: 27502 - DNA, 122 bp, Homo sapiens
  misc_feature (61)..(62): /note="This region represents a CpG dinucleotide"
  misc_feature (61)..(61): /note="Nucleotide may be methylated to form 5-methylcytosine"
gcatattttacccccaaaactgaaagtgattgcaacattcaagcttggcaatactcagctcgctaggcaggaagcagtttaccatgtgggcactgatggggagagctccatttatccgaagc

SEQ ID NO: 27503 - DNA, 122 bp, Homo sapiens
  misc_feature (61)..(62): /note="This region represents a CpG dinucleotide"
  misc_feature (61)..(61): /note="Nucleotide may be methylated to form 5-methylcytosine"
cactatttggtgaaataaatttgaggaaggacagaggagctcaagagttaatacctaaagcgcacaactactcattggagtgcagggccactggtgaggaacaaacagcagggcatgctaga

SEQ ID NO: 27504 - DNA, 122 bp, Homo sapiens
  misc_feature (61)..(62): /note="This region represents a CpG dinucleotide"
  misc_feature (61)..(61): /note="Nucleotide may be methylated to form 5-methylcytosine"
tcctgctcggttctttggccgccagctgtccctgttaagtctgattgggatccagctgtacgacatgtgccaggcattggcgtggtgctttcacatttattagattgtttcagtctcagaac

SEQ ID NO: 27505 - DNA, 122 bp, Homo sapiens
  misc_feature (61)..(62): /note="This region represents a CpG dinucleotide"
  misc_feature (61)..(61): /note="Nucleotide may be methylated to form 5-methylcytosine"
ctgtggctgacactgcaaagaatcccggctcagccacgtccttgttcttgtgcaagccagcgccctgcacctgaaggcccttatgtggagggtgactacatgctctgccttgcctgagtcag

SEQ ID NO: 27506 - DNA, 122 bp, Homo sapiens
  misc_feature (61)..(62): /note="This region represents a CpG dinucleotide"
  misc_feature (61)..(61): /note="Nucleotide may be methylated to form 5-methylcytosine"
tgatgcaaggagtgccagaactcctttctgttggaggttgcagaaagattcagttcctagcgaatcaatgtctgtgctgctaatggtggcatctaaaatctagtactgtccattattagtaa

SEQ ID NO: 27507 - DNA, 122 bp, Homo sapiens
  misc_feature (61)..(62): /note="This region represents a CpG dinucleotide"
  misc_feature (61)..(61): /note="Nucleotide may be methylated to form 5-methylcytosine"
tttgcatctaaaatgttacaatgaaaccacataactccctcctcaaaatgtttcatgtgacgtctccttgaagtggctttcactttagctatgtgtggcttcctttatttgcttcagcaaca

SEQ ID NO: 27508 - DNA, 122 bp, Homo sapiens
  misc_feature (61)..(62): /note="This region represents a CpG dinucleotide"
  misc_feature (61)..(61): /note="Nucleotide may be methylated to form 5-methylcytosine"
ttgtgtaccaaccttggaagaattaagaaaacaatcaatcaaagcattttcagggttctgcggttcagatgagtaacccaggttgagaaagaccgagatttactccattcaaaatgcccctc

SEQ ID NO: 27509 - DNA, 122 bp, Homo sapiens
  misc_feature (61)..(62): /note="This region represents a CpG dinucleotide"
  misc_feature (61)..(61): /note="Nucleotide may be methylated to form 5-methylcytosine"
gagaccccagcttattcctcaaagttcacccaaccctgaatataggtgaacctggagtgccgtcagtgggtagaaggggaagaggagtaacctaggagagatgggggaaccacctcatttgc

SEQ ID NO: 27510 - DNA, 122 bp, Homo sapiens
  misc_feature (61)..(62): /note="This region represents a CpG dinucleotide"
  misc_feature (61)..(61): /note="Nucleotide may be methylated to form 5-methylcytosine"
aaccatatcccctccctgatctcactctgatgattacatctgtctcatatttcagtctctcgctcttgccttactcctttcttgcatccattaatatttcaggtttcattagaaaaatacct

SEQ ID NO: 27511 - DNA, 122 bp, Homo sapiens
  misc_feature (61)..(62): /note="This region represents a CpG dinucleotide"
  misc_feature (61)..(61): /note="Nucleotide may be methylated to form 5-methylcytosine"
gggcagttccaggtgtgcacctgtagtctcatacttggtcccatcttcaactaaccacagcgagctgtgatatctctgccacctgactgagcatcttgaggcaaagattctcttgcttgact

SEQ ID NO: 27512 - DNA, 122 bp, Homo sapiens
  misc_feature (61)..(62): /note="This region represents a CpG dinucleotide"
  misc_feature (61)..(61): /note="Nucleotide may be methylated to form 5-methylcytosine"
gctcatcatggtcagccttccacttcttgatggtttccttctgctatgaatgcgcatgtccggttgtctgcttcttagagcagacatttacctgaaagaaaatgttacaataattagttact

SEQ ID NO: 27513 - DNA, 122 bp, Homo sapiens
  misc_feature (61)..(62): /note="This region represents a CpG dinucleotide"
  misc_feature (61)..(61): /note="Nucleotide may be methylated to form 5-methylcytosine"
ggttaaaaggcatcttttggcatcgctcaggttctgaggcattagcaaaataatagcactcggcttgtccattgaaactgacagagtctatatacagcaagccctttacaaggcagtcaagt

SEQ ID NO: 27514 - DNA, 122 bp, Homo sapiens
  misc_feature (61)..(62): /note="This region represents a CpG dinucleotide"
  misc_feature (61)..(61): /note="Nucleotide may be methylated to form 5-methylcytosine"
attttttcattaagcaagaatcaaccaaatctctaaaacatcatgaactagtactgtattcgtattaaagatacaatctctcagttcttttcgtttcttatggaaccaaaagaaaaagagac

SEQ ID NO: 27515 - DNA, 122 bp, Homo sapiens
  misc_feature (61)..(62): /note="This region represents a CpG dinucleotide"
  misc_feature (61)..(61): /note="Nucleotide may be methylated to form 5-methylcytosine"
agaccagccctccttccttgaggacaggactgactaggtctgaacacagcaggtgccccacgcatgagctgaactccactgaactacagccagtcacacagactggagggtctttctgtggg

SEQ ID NO: 27516 - DNA, 122 bp, Homo sapiens
  misc_feature (61)..(62): /note="This region represents a CpG dinucleotide"
  misc_feature (61)..(61): /note="Nucleotide may be methylated to form 5-methylcytosine"
tgtaagatatggttctttctgaagcaccctcagaaaattgtcagcagcttcacagtataacgtgcagagatgggtagttggagctacctggaaatgcggaattaacagaataaagaagtatt

SEQ ID NO: 27517 - DNA, 122 bp, Homo sapiens
  misc_feature (61)..(62): /note="This region represents a CpG dinucleotide"
  misc_feature (61)..(61): /note="Nucleotide may be methylated to form 5-methylcytosine"
tgtaattcttgtcccactggttcttgtaagttagagtgacagtgtgcctggcacagtcaccgctaacagtgcaaggcattgtcttaaaaccattgcagatggtttgatcctgctagcaacct

SEQ ID NO: 27518 - DNA, 122 bp, Homo sapiens
  misc_feature (61)..(62): /note="This region represents a CpG dinucleotide"
  misc_feature (61)..(61): /note="Nucleotide may be methylated to form 5-methylcytosine"
gttcacactttaactctactgtgtaccaggtctttgtgaccctggcaaattttgtaacctcgcctgacgctagtctcctcaactcaaaagcagggtcatgatattcacctcatagagttggc

SEQ ID NO: 27519 - DNA, 122 bp, Homo sapiens
  misc_feature (61)..(62): /note="This region represents a CpG dinucleotide"
  misc_feature (61)..(61): /note="Nucleotide may be methylated to form 5-methylcytosine"
gtggatgaggcagcaaagggtaagcagcttcttgaacagcccaaacctgtgcaggccagacgttccagcacgatggggtcagcccatgtgtttgtgtgacaaagagtcttctagacctcagg

SEQ ID NO: 27520 - DNA, 122 bp, Homo sapiens
  misc_feature (61)..(62): /note="This region represents a CpG dinucleotide"
  misc_feature (61)..(61): /note="Nucleotide may be methylated to form 5-methylcytosine"
tctttgatgatcataaagtgatgagcaggaaaatctctgcatcaatgtcctctgctgttccgtttcaagtcaaattcaaaacatgtcagccatactcatcattcacactcacactcattcac

SEQ ID NO: 27521 - DNA, 122 bp, Homo sapiens
  misc_feature (61)..(62): /note="This region represents a CpG dinucleotide"
  misc_feature (61)..(61): /note="Nucleotide may be methylated to form 5-methylcytosine"
ccaactgatctcttgaccttgtgacattcttcttctggacgagtctcaggagttccccaccgagcaccttgtgacccccggccctgccagcaaaagataaccacctttaactttccactacc

SEQ ID NO: 27522 - DNA, 122 bp, Homo sapiens
  misc_feature (61)..(62): /note="This region represents a CpG dinucleotide"
  misc_feature (61)..(61): /note="Nucleotide may be methylated to form 5-methylcytosine"
aaagggcacggatccgcgggtcagcaagcccgacgaatttacaccaatgacccgccgtgtcgccagtctcagaccagggcacaacacgccaaccctgcagaccacccccacctccccagcca

SEQ ID NO: 27523 - DNA, 122 bp, Homo sapiens
  misc_feature (61)..(62): /note="This region represents a CpG dinucleotide"
  misc_feature (61)..(61): /note="Nucleotide may be methylated to form 5-methylcytosine"
tggccaacatggtgaaatcccgtctttgctgaaaatacaaaaattagccgggtgtggtggcgcatggctgtaatcccagaaactcaggaggctgagtcaggagaatcacttaaatccgggag

SEQ ID NO: 27524 - DNA, 122 bp, Homo sapiens
  misc_feature (61)..(62): /note="This region represents a CpG dinucleotide"
  misc_feature (61)..(61): /note="Nucleotide may be methylated to form 5-methylcytosine"
ctctcccgcttgctggtcccttgctgccatcacgtctctaactggacaggtgctggaaagcggggttgggggagtgggggaatgcaccctccctgctgctgccacttcacttcccaccgatg

SEQ ID NO: 27525 - DNA, 122 bp, Homo sapiens
  misc_feature (61)..(62): /note="This region represents a CpG dinucleotide"
  misc_feature (61)..(61): /note="Nucleotide may be methylated to form 5-methylcytosine"
cctacactgaggccacgaaagctcagagaaagcagcagatggcagaggtaatgagactaacgttcaggggttctattaaaagatgtgtgaaattatgttgaaaagtttaaactgcccggcac

SEQ ID NO: 27526 - DNA, 122 bp, Homo sapiens
  misc_feature (61)..(62): /note="This region represents a CpG dinucleotide"
  misc_feature (61)..(61): /note="Nucleotide may be methylated to form 5-methylcytosine"
ttctcggtaggctctgtgcctgaggggctcccaccctgtctttgaaatatgcaagggacacgaaggccaacatgaagctcatcttcactcctgtgtcaggaaactattcctgaagggtacag

SEQ ID NO: 27527 - DNA, 122 bp, Homo sapiens
  misc_feature (61)..(62): /note="This region represents a CpG dinucleotide"
  misc_feature (61)..(61): /note="Nucleotide may be methylated to form 5-methylcytosine"
tcagttttctgtaccagcatctattactccatcctcatattcccagaaaggaggaaattacgacaccttaaatgtgatacatcatatttggtcaatcaggggtgaaattttaaaatcactca

SEQ ID NO: 27528 - DNA, 122 bp, Homo sapiens
  misc_feature (61)..(62): /note="This region represents a CpG dinucleotide"
  misc_feature (61)..(61): /note="Nucleotide may be methylated to form 5-methylcytosine"
gggcctcccagggagctggtaggagcaaggcaagctgcttgtcagtagagcaaaaaatggcgatgatgatctgacccaaggcattttgatcttagccactgtcagcagctggatgagcaatt

SEQ ID NO: 27529 - DNA, 122 bp, Homo sapiens
  misc_feature (61)..(62): /note="This region represents a CpG dinucleotide"
  misc_feature (61)..(61): /note="Nucleotide may be methylated to form 5-methylcytosine"
ctgaccccacaaggaaaacacatacagctatctgtacaaggagggaagaatccacagagacgcaggagagccatcgatctagaacaaagtcatagcttttgatattagggaagcagaacaga

SEQ ID NO: 27530 - DNA, 122 bp, Homo sapiens
  misc_feature (61)..(62): /note="This region represents a CpG dinucleotide"
  misc_feature (61)..(61): /note="Nucleotide may be methylated to form 5-methylcytosine"
aaatggataagaacatcacccaatggaagaggatgtcacagctcagaaggctgggctgcacgctttatcagcccctggaagagagcaggggcactgcccaagcctgaaaacattgcacttcc

SEQ ID NO: 27531 - DNA, 122 bp, Homo sapiens
  misc_feature (61)..(62): /note="This region represents a CpG dinucleotide"
  misc_feature (61)..(61): /note="Nucleotide may be methylated to form 5-methylcytosine"
gcaccccaggttcatgcaggtaacacaggagtcacacccaggaggtctgatgccagaatccggagtctaggctgctgcctggggtaggatctcccaggtcaaagagggaaccaacattacct

SEQ ID NO: 27532 - DNA, 122 bp, Homo sapiens
  misc_feature (61)..(62): /note="This region represents a CpG dinucleotide"
  misc_feature (61)..(61): /note="Nucleotide may be methylated to form 5-methylcytosine"
ctgaatcaaagggtgaactcaccagacatgaatcatgccagcctgttaagtaggtacaagcgtttttattcctggccataggagcagccttgcttgtaattaaccatcatccctaatatctg

SEQ ID NO: 27533 - DNA, 122 bp, Homo sapiens
  misc_feature (61)..(62): /note="This region represents a CpG dinucleotide"
  misc_feature (61)..(61): /note="Nucleotide may be methylated to form 5-methylcytosine"
ttagggtggagacaatgttaaaatgcagcaaaattagtctctatacctcaaaaggtgaaacggaagacacagaagtaccttgtgtgcagccttcatggacagaactgcagaaccactctgcg

SEQ ID NO: 27534 - DNA, 122 bp, Homo sapiens
  misc_feature (61)..(62): /note="This region represents a CpG dinucleotide"
  misc_feature (61)..(61): /note="Nucleotide may be methylated to form 5-methylcytosine"
cacttaactaaactcttgcggtgtcttatgaccagggacgaagtgcggggccccttcagacgtcgcagctggagtaactgttttctttccatttcacagctcttgaaggaggtgtgactgag

SEQ ID NO: 27535 - DNA, 122 bp, Homo sapiens
  misc_feature (61)..(62): /note="This region represents a CpG dinucleotide"
  misc_feature (61)..(61): /note="Nucleotide may be methylated to form 5-methylcytosine"
catagcagcgttagtcacaagaacccaaaggtggaagcaacgcaagtgtccatcagctgacgaacggatacacaagatgtggcctagacattcactggaaagtgactcagccttaaaaagga

SEQ ID NO: 27536 - DNA, 122 bp, Homo sapiens
  misc_feature (61)..(62): /note="This region represents a CpG dinucleotide"
  misc_feature (61)..(61): /note="Nucleotide may be methylated to form 5-methylcytosine"
ctgtggatgctataattacataacagttctcctttgaccagtgctcatccacgtacgtcacgtacacaccaatggatccttgtactgcagatcagacagcttcgtctgcaaatactaagatg

SEQ ID NO: 27537 - DNA, 122 bp, Homo sapiens
  misc_feature (61)..(62): /note="This region represents a CpG dinucleotide"
  misc_feature (61)..(61): /note="Nucleotide may be methylated to form 5-methylcytosine"
tgtgtctctattacagaaactcccagaacagtccattgttttattcccctccctgtgatgcggtgaatactgtgagaacaagaacagtgccttacacaccttcccaaccctcaggcctagca

SEQ ID NO: 27538 - DNA, 122 bp, Homo sapiens
  misc_feature (61)..(62): /note="This region represents a CpG dinucleotide"
  misc_feature (61)..(61): /note="Nucleotide may be methylated to form 5-methylcytosine"
ttggcattttgtacatatgaatcagaagattatttttctcattcctgaagggtgactccacgtaagcataagatattcctttgttgtggctctgttctaggtgtgacacttatccttgcagt

SEQ ID NO: 27539 - DNA, 122 bp, Homo sapiens
  misc_feature (61)..(62): /note="This region represents a CpG dinucleotide"
  misc_feature (61)..(61): /note="Nucleotide may be methylated to form 5-methylcytosine"
aatgaaggaagtgggttctgtcccgtagggttgaggagccgagatgcggggaccaagggacgtcagcgcgttggttctggccgcgggaaaacgggcggtcgctgtgaccgtctctgcgctct

SEQ ID NO: 27540 - DNA, 122 bp, Homo sapiens
  misc_feature (61)..(62): /note="This region represents a CpG dinucleotide"
  misc_feature (61)..(61): /note="Nucleotide may be methylated to form 5-methylcytosine"
ccagtgagacaagactggtggttctcaaagactcatatgtcccttacaggcgcctgcccccgcaaccgattcgaccactccctagatttggtgagactaattccaccccattttctttctcc

SEQ ID NO: 27541 - DNA, 122 bp, Homo sapiens
  misc_feature (61)..(62): /note="This region represents a CpG dinucleotide"
  misc_feature (61)..(61): /note="Nucleotide may be methylated to form 5-methylcytosine"
tcagtgaatgtttataaaagtgcaggaatgttggtcaccacccatcccttggtgtttccacggagaatgatgaaaatggtcagcagctgagaccacgcacaatgtgccctgctgtctccaag

SEQ ID NO: 27542 - DNA, 122 bp, Homo sapiens
  misc_feature (61)..(62): /note="This region represents a CpG dinucleotide"
  misc_feature (61)..(61): /note="Nucleotide may be methylated to form 5-methylcytosine"
ctctgatgacaaggcagctgggtgaggctgggtgccacgtgggttggtgagccgacctcacgccttgttgcagaatgccttctggttctgcctggcatggtgcaccttcttcctgatcccca

SEQ ID NO: 27543 - DNA, 122 bp, Homo sapiens
  misc_feature (61)..(62): /note="This region represents a CpG dinucleotide"
  misc_feature (61)..(61): /note="Nucleotide may be methylated to form 5-methylcytosine"
ggcgactttacgttgacgtctttgaaaacctgcttacctttttcagggctctccagccctcgcctccagatgtgaattggacttaggatagttttttcagggcagtaggaattgcttgtgga

SEQ ID NO: 27544 - DNA, 122 bp, Homo sapiens
  misc_feature (61)..(62): /note="This region represents a CpG dinucleotide"
  misc_feature (61)..(61): /note="Nucleotide may be methylated to form 5-methylcytosine"
aggagtgctgagtgaagcaaaggaaactggctggagctgagccaggttgccagtcttggacgcggctccatcttttattcagagaatgacctcatccttggtcctggttctttaaaagaaag

SEQ ID NO: 27545 - DNA, 122 bp, Homo sapiens
  misc_feature (61)..(62): /note="This region represents a CpG dinucleotide"
  misc_feature (61)..(61): /note="Nucleotide may be methylated to form 5-methylcytosine"
taagtaactacacatgctcactgccctgggcccaaagctggggcgagagcctggaatcagcgcacccccaagaattccggaacatgggaagatgcccatctttcatggagggggcatgcctc

SEQ ID NO: 27546 - DNA, 122 bp, Homo sapiens
  misc_feature (61)..(62): /note="This region represents a CpG dinucleotide"
  misc_feature (61)..(61): /note="Nucleotide may be methylated to form 5-methylcytosine"
acacacaacttcatataccctgtggctgaaagacgtagtggcagaggcaattaacaggctcgcagttcccccactgcccacatcctgaaaaacatgtgggcattaaggaggttgttctgata

SEQ ID NO: 27547 - DNA, 122 bp, Homo sapiens
  misc_feature (61)..(62): /note="This region represents a CpG dinucleotide"
  misc_feature (61)..(61): /note="Nucleotide may be methylated to form 5-methylcytosine"
cacggtgggtggccatctttggagagtacaatctgccacactccccttgaatgatgctcacgtctagctgggaagacatacatgagcatgcagcaataaagtgcacaaaccgtcacacaggt

SEQ ID NO: 27548 - DNA, 122 bp, Homo sapiens
  misc_feature (61)..(62): /note="This region represents a CpG dinucleotide"
  misc_feature (61)..(61): /note="Nucleotide may be methylated to form 5-methylcytosine"
gactcagcgcgttgtggacgggctcatctacaaccgggaggaatacgtgcattttgacagcgcagtgggggagttcctagcagtgatggagctggggcggcccataggcgagtacttcaata

SEQ ID NO: 27549 - DNA, 122 bp, Homo sapiens
  misc_feature (61)..(62): /note="This region represents a CpG dinucleotide"
  misc_feature (61)..(61): /note="Nucleotide may be methylated to form 5-methylcytosine"
atgcttgcatttgacatacatgtgctcatcctgtgctcatcttacttgacctttcggcagcgttagataccactgtatactccctctattttgaaatactttcttcccttgcctttcatgac

SEQ ID NO: 27550 - DNA, 122 bp, Homo sapiens
  misc_feature (61)..(62): /note="This region represents a CpG dinucleotide"
  misc_feature (61)..(61): /note="Nucleotide may be methylated to form 5-methylcytosine"
ttcaaactgagttttccaacactgggcgagtttcagcaaagtagggctgggataatggtgcggctcttgtgattaatctactccaggaaaggttgaatgagaagttaatgtggatcccccag

SEQ ID NO: 27551 - DNA, 122 bp, Homo sapiens
  misc_feature (61)..(62): /note="This region represents a CpG dinucleotide"
  misc_feature (61)..(61): /note="Nucleotide may be methylated to form 5-methylcytosine"
gtgtctaatttattttcttattacttatcaaattttccacaacaagcatgcttctccttgcgtaatcagaaaagaagttattacattttttagaaatgaaatcatttaaataatgaaagaag

SEQ ID NO: 27552 - DNA, 122 bp, Homo sapiens
  misc_feature (61)..(62): /note="This region represents a CpG dinucleotide"
  misc_feature (61)..(61): /note="Nucleotide may be methylated to form 5-methylcytosine"
ttgcactgagccatgggcatgtctgaacacaacaaggaagaggccagagcagcaacagcacgcaaagggttgatgggcatttcttttaagacagagcagaaaactcttagatactttgcgtc

SEQ ID NO: 27553 - DNA, 122 bp, Homo sapiens
  misc_feature (61)..(62): /note="This region represents a CpG dinucleotide"
  misc_feature (61)..(61): /note="Nucleotide may be methylated to form 5-methylcytosine"
aagattacagccccatgagccatccttacctatacctcaattcctttaaggaagttaaatcgtatgtaggaaataatctctttaggatacagcccagtagttcctcctctaatacagacatt

SEQ ID NO: 27554 - DNA, 122 bp, Homo sapiens
  misc_feature (61)..(62): /note="This region represents a CpG dinucleotide"
  misc_feature (61)..(61): /note="Nucleotide may be methylated to form 5-methylcytosine"
tatgattcataaccaaatgcagtcagcgttacttgatttgcataaaccagcagaaaaggacgtttgcgactattagagaagtttgaagtttttagatgatgttgaaaatgtactattaatta

SEQ ID NO: 27555 - DNA, 122 bp, Homo sapiens
  misc_feature (61)..(62): /note="This region represents a CpG dinucleotide"
  misc_feature (61)..(61): /note="Nucleotide may be methylated to form 5-methylcytosine"
gggtggctctgactcagggtctcataaggtcgctgttaagacacactttggagctgcagtcgtctaaaggcttggctggggctgaaagatctgcttccaaactcatgcatgtgttgttaaca

SEQ ID NO: 27556 - DNA, 122 bp, Homo sapiens
  misc_feature (61)..(62): /note="This region represents a CpG dinucleotide"
  misc_feature (61)..(61): /note="Nucleotide may be methylated to form 5-methylcytosine"
tgcaagtgccaccatgctagtgtgatttggacttcagtaaaagttagtttgcttccttcccgttgtcccatctcactcctgggccacccgtggggctgctggtagctggtgtgtggctgctg

SEQ ID NO: 27557 - DNA, 122 bp, Homo sapiens
  misc_feature (61)..(62): /note="This region represents a CpG dinucleotide"
  misc_feature (61)..(61): /note="Nucleotide may be methylated to form 5-methylcytosine"
tggggtgtggcgcagctattgtgctgggcaaggacaagctcaggctgctggtatgccatccgccactagcgagagatgaggggatggggggccgggctgaggaggcaaggagggggcgggct

SEQ ID NO: 27558 - DNA, 122 bp, Homo sapiens
  misc_feature (61)..(62): /note="This region represents a CpG dinucleotide"
  misc_feature (61)..(61): /note="Nucleotide may be methylated to form 5-methylcytosine"
tctgtcctgccccgtcctaggaatctcatgtctcaaggccaaattcgctaagtcaaaagacgagttacagacataacttagattagtaagggtctaccctctctcctccacaggaagctgtc

SEQ ID NO: 27559 - DNA, 122 bp, Homo sapiens
  misc_feature (61)..(62): /note="This region represents a CpG dinucleotide"
  misc_feature (61)..(61): /note="Nucleotide may be methylated to form 5-methylcytosine"
tttttcaacgttgataatactcaatttcatggctgaatacacatgtaaacacggttaggtcgtgtttttcgccacttgcaccaaacagaatgtcgcttgtctcggtgccatgggaggttaca

SEQ ID NO: 27560 - DNA, 122 bp, Homo sapiens
  misc_feature (61)..(62): /note="This region represents a CpG dinucleotide"
  misc_feature (61)..(61): /note="Nucleotide may be methylated to form 5-methylcytosine"
gagtagagaagatgaccaggctcatagccttctgtggttcctcgcacagtgccctggggacgtggctaggtgtttacacactgccacaagcagggccaaattctgtctacacattcagtgtg

SEQ ID NO: 27561 - DNA, 122 bp, Homo sapiens
  misc_feature (61)..(62): /note="This region represents a CpG dinucleotide"
  misc_feature (61)..(61): /note="Nucleotide may be methylated to form 5-methylcytosine"
agtatttatttaccatgggttaatcattcatttgctttatctgtttgttccatgacatgtcgtttcttcctaactggtctgtagcttctttcctttctatctcttttagattgctgcagatt

SEQ ID NO: 27562 - DNA, 122 bp, Homo sapiens
  misc_feature (61)..(62): /note="This region represents a CpG dinucleotide"
  misc_feature (61)..(61): /note="Nucleotide may be methylated to form 5-methylcytosine"
accatggccaacacagcgaggaatgcactgtgcagtgagatggcagtggaaggcacagaacgggcagacatgagactgtgagtcagtcttaaagctgactacataggataaataaaaagcaa

SEQ ID NO: 27563 - DNA, 122 bp, Homo sapiens
  misc_feature (61)..(62): /note="This region represents a CpG dinucleotide"
  misc_feature (61)..(61): /note="Nucleotide may be methylated to form 5-methylcytosine"
cacacatttgttgggcacccatcatgtgccaggcactgttctaggtgtttgggttgcattcgtgaacaaagaagggctcttaccctcatgcagccttgctttcctgcagcctaaatgatttg

SEQ ID NO: 27564 - DNA, 122 bp, Homo sapiens
  misc_feature (61)..(62): /note="This region represents a CpG dinucleotide"
  misc_feature (61)..(61): /note="Nucleotide may be methylated to form 5-methylcytosine"
agattgtcataatattaaaccattttcattccctcaaagccacatcatttttgttcaaaccggaagaagtgttggccaatgggggcattactcacagaatatttgtcaggccagatgtattg

SEQ ID NO: 27565 - DNA, 122 bp, Homo sapiens
  misc_feature (61)..(62): /note="This region represents a CpG dinucleotide"
  misc_feature (61)..(61): /note="Nucleotide may be methylated to form 5-methylcytosine"
ccgtacaagaccagcataggcacctctatcatctcaggatattgcacaatgaggaagtcacgcacaccatgtccagcttgaccatggcagggaaagtgtctgaccaagaagaggagatgaga

SEQ ID NO: 27566 - DNA, 122 bp, Homo sapiens
  misc_feature (61)..(62): /note="This region represents a CpG dinucleotide"
  misc_feature (61)..(61): /note="Nucleotide may be methylated to form 5-methylcytosine"
caaccatgagagccgaggtgggaggcatgggaaacagtgcagtgactcaccccctgcccccgcaccaaccacccatattcaggagaagaggacagacacggcacctctgagtcacccctctc

SEQ ID NO: 27567 - DNA, 122 bp, Homo sapiens
  misc_feature (61)..(62): /note="This region represents a CpG dinucleotide"
  misc_feature (61)..(61): /note="Nucleotide may be methylated to form 5-methylcytosine"
cagactttaaagctgagctcgattctgctgactacttattttcagcattcaaagacacatcgtccatataacctactcatcattcaatcaagtatttccttgttcattaacttttcatgtgg

SEQ ID NO: 27568 - DNA, 122 bp, Homo sapiens
  misc_feature (61)..(62): /note="This region represents a CpG dinucleotide"
  misc_feature (61)..(61): /note="Nucleotide may be methylated to form 5-methylcytosine"
attttaaatggcagctgacacccagcctgaagattgtggagatgcagagcgtggtagagacggagcaaataggaggtgtctatctttgcttaaggccattattgccatgtgggcccagtgtt

SEQ ID NO: 27569 - DNA, 122 bp, Homo sapiens
  misc_feature (61)..(62): /note="This region represents a CpG dinucleotide"
  misc_feature (61)..(61): /note="Nucleotide may be methylated to form 5-methylcytosine"
catatatattacacatggtccctgcccccaagaacttacagcctaaaagaagacacccatcgacaatttcaatccagagtgttaagtgctgttacagaggagctggggagaggctgcatagt

SEQ ID NO: 27570 - DNA, 122 bp, Homo sapiens
  misc_feature (61)..(62): /note="This region represents a CpG dinucleotide"
  misc_feature (61)..(61): /note="Nucleotide may be methylated to form 5-methylcytosine"
aagagcaagtattaacgctgtcatacaattttaaaatagcaccagattaaaaagaaccaccgggtactttcattcttattttttccataaagaaaagttgtatcagctctggtagagcagat

SEQ ID NO: 27571 - DNA, 122 bp, Homo sapiens
  misc_feature (61)..(62): /note="This region represents a CpG dinucleotide"
  misc_feature (61)..(61): /note="Nucleotide may be methylated to form 5-methylcytosine"
gaggtcagaaaggtccgttctgaatggaacccattaatctccctgttgtgagcgaggaaacgttggaaagcgcaggtgttaacagtctcggtgttatttttgggagaatgtgaactgaacac

SEQ ID NO: 27572 - DNA, 122 bp, Homo sapiens
  misc_feature (61)..(62): /note="This region represents a CpG dinucleotide"
  misc_feature (61)..(61): /note="Nucleotide may be methylated to form 5-methylcytosine"
ccctgaagtggtgttttatgggcctgggcactctggcacaagccctttctgggcacaaggcgaagttgatgagactcatgcttactgccagcttgctccaggccactttcagccaccagcac

SEQ ID NO: 27573 - DNA, 122 bp, Homo sapiens
  misc_feature (61)..(62): /note="This region represents a CpG dinucleotide"
  misc_feature (61)..(61): /note="Nucleotide may be methylated to form 5-methylcytosine"
ctgatttgcccatgatcctacagccagcaagcagttaagcttgctgtagaatccagggtgcgtgtcaaaagtcaacctcttcccatgtcacttcccagcctctccaaacttagaagctctgc

SEQ ID NO: 27574 - DNA, 122 bp, Homo sapiens
  misc_feature (61)..(62): /note="This region represents a CpG dinucleotide"
  misc_feature (61)..(61): /note="Nucleotide may be methylated to form 5-methylcytosine"
aaacttatctggagtcaacttaaacaaaagaaaatttttattggctcatgtgacctgaaacggtcaggtgtctgccttcaggcatggctgtatccagctgctcaaatggtgttatctcatcc

SEQ ID NO: 27575 - DNA, 122 bp, Homo sapiens
  misc_feature (61)..(62): /note="This region represents a CpG dinucleotide"
  misc_feature (61)..(61): /note="Nucleotide may be methylated to form 5-methylcytosine"
gggcaagcgtgggtggtgggcaggctgccatttccatgagaccagagctcgaggcttcgtcgtttagcctctgtccttccacacagtgcaggcagcaggcagtgaggacaggtccctggatg

SEQ ID NO: 27576 - DNA, 122 bp, Homo sapiens
  misc_feature (61)..(62): /note="This region represents a CpG dinucleotide"
  misc_feature (61)..(61): /note="Nucleotide may be methylated to form 5-methylcytosine"
attatttgtttcatgtatgttgttttattattcttaaattatctcctttggatttattggcgtcttctccagtgtatgtcatgctaaccacatagtaatttgatggttaaagggatgaggca

SEQ ID NO: 27577 - DNA, 122 bp, Homo sapiens
  misc_feature (61)..(62): /note="This region represents a CpG dinucleotide"
  misc_feature (61)..(61): /note="Nucleotide may be methylated to form 5-methylcytosine"
gtttccctgtagggagcagggcctcttgtatatctaagaggtcactttgtggcaagaaagcgagaatgtggttgggtcacaagaaaacccaagcgagcggtgcctcatgcctgtaataccag

SEQ ID NO: 27578 - DNA, 122 bp, Homo sapiens
  misc_feature (61)..(62): /note="This region represents a CpG dinucleotide"
  misc_feature (61)..(61): /note="Nucleotide may be methylated to form 5-methylcytosine"
gccattgtcagtgaatgccacctgtctgctcctggagtcggagtctctctccagagggggcgttattcagagctgtgaagtgttaagtgattggaattacatggttgaaagggaggccaact

SEQ ID NO: 27579 - DNA, 122 bp, Homo sapiens
  misc_feature (61)..(62): /note="This region represents a CpG dinucleotide"
  misc_feature (61)..(61): /note="Nucleotide may be methylated to form 5-methylcytosine"
atctgaggttagtttcatcgtttcgttgaaagttaaaaccctaagtcgacgttccccagccgcctaccccccagcagagagtccttccccggggagtcctgccctggggtgccgcctcgagg

SEQ ID NO: 27580 - DNA, 122 bp, Homo sapiens
  misc_feature (61)..(62): /note="This region represents a CpG dinucleotide"
  misc_feature (61)..(61): /note="Nucleotide may be methylated to form 5-methylcytosine"
ctgactcatctgttcccagagctgactcagtcctcgctccctggagccagaatgctcttccgtgcacattcattgaacattctagacagtgtgccaagatgctggagctacacgggtgaaaa

SEQ ID NO: 27581 - DNA, 122 bp, Homo sapiens
  misc_feature (61)..(62): /note="This region represents a CpG dinucleotide"
  misc_feature (61)..(61): /note="Nucleotide may be methylated to form 5-methylcytosine"
gaaaggaccttggaaagggacaagtctaggtgtgacgccacagccacagcaggagtcttacgggttgagggactgaagactgacagatctgtaaacagtacattcaccagagtggaatgagc

SEQ ID NO: 27582 - DNA, 122 bp, Homo sapiens
  misc_feature (61)..(62): /note="This region represents a CpG dinucleotide"
  misc_feature (61)..(61): /note="Nucleotide may be methylated to form 5-methylcytosine"
gagatggtctttgcttctttcttacttggtttgctggaaaactgctctccagtggcttcccgggaaaagttttacaggaggaaaaatgctgaggttgcatgtccacgttgcatagccaaagg

SEQ ID NO: 27583 - DNA, 122 bp, Homo sapiens
  misc_feature (61)..(62): /note="This region represents a CpG dinucleotide"
  misc_feature (61)..(61): /note="Nucleotide may be methylated to form 5-methylcytosine"
ccatctaggatttctgcaattgctttgtagctgctcttcctgctcttataattcattaggcgtatagaattcagagcaatattttaaaaatataagttaaaattacatcattcattctcttc

SEQ ID NO: 27584 - DNA, 122 bp, Homo sapiens
  misc_feature (61)..(62): /note="This region represents a CpG dinucleotide"
  misc_feature (61)..(61): /note="Nucleotide may be methylated to form 5-methylcytosine"
tgtagacagaccacagtccagtctacaagatgcacattaaacacagacacattcatatttcgtcatgtgccaatcaataaagcaatgccagtaagcccaagttataagcttgcaggacgtgt

SEQ ID NO: 27585 - DNA, 122 bp, Homo sapiens
  misc_feature (61)..(62): /note="This region represents a CpG dinucleotide"
  misc_feature (61)..(61): /note="Nucleotide may be methylated to form 5-methylcytosine"
taacatgtagaagtagctacacaaactttggtttaactacatgcagtcagcagcacattgcgtttctcctcaatcaggcacaagactgtcagagtcaccacactgctatcgacaagtgcaac

SEQ ID NO: 27586 - DNA, 122 bp, Homo sapiens
  misc_feature (61)..(62): /note="This region represents a CpG dinucleotide"
  misc_feature (61)..(61): /note="Nucleotide may be methylated to form 5-methylcytosine"
tggtactgttccttctcacatgaagaggctcactcacccaggtccatgacgctctctgggcggtaaaaccacacaggaaggctgtgcccggcctcgcactacccctgtctggggaggaagtg

SEQ ID NO: 27587 - DNA, 122 bp, Homo sapiens
  misc_feature (61)..(62): /note="This region represents a CpG dinucleotide"
  misc_feature (61)..(61): /note="Nucleotide may be methylated to form 5-methylcytosine"
gagtacttagatcaaacctgttttttcagcagaggcaatggcatttacttcagccacacccgtcatcactgatatttaatgctttctgcctttatactcttccactgagagtaaaaggacct

SEQ ID NO: 27588 - DNA, 122 bp, Homo sapiens
  misc_feature (61)..(62): /note="This region represents a CpG dinucleotide"
  misc_feature (61)..(61): /note="Nucleotide may be methylated to form 5-methylcytosine"
actccacggggcttgaatgatcagacctcaggctgccaggcttcctgtccccagttcctccggctcccgcagagcccacagggacctgcagatctgagtgccctgcccacccccgcccgcct

SEQ ID NO: 27589 - DNA, 122 bp, Homo sapiens
  misc_feature (61)..(62): /note="This region represents a CpG dinucleotide"
  misc_feature (61)..(61): /note="Nucleotide may be methylated to form 5-methylcytosine"
aaataagcagcagatgcagcaaggcctctgcagatttaaaaaaaaaaaaaaagcatgttgcgtcagagcacatgtctccccaaagggtacgtgtacgaacagcatgcagacttgtgaactga

SEQ ID NO: 27590 - DNA, 122 bp, Homo sapiens
  misc_feature (61)..(62): /note="This region represents a CpG dinucleotide"
  misc_feature (61)..(61): /note="Nucleotide may be methylated to form 5-methylcytosine"
agagcctcaggggtgcgggagcacctccgcggaaggccccgtggtatgtcagtggtggagcgtgtccagtagctggggatttggccttggcaagaggcagctatgagaggaagcacggaaca

SEQ ID NO: 27591 - DNA, 122 bp, Homo sapiens
  misc_feature (61)..(62): /note="This region represents a CpG dinucleotide"
  misc_feature (61)..(61): /note="Nucleotide may be methylated to form 5-methylcytosine"
agccagggcgaaacctcagcgccgagcccagctgctccaccggctctacactggcaggcacgctgcaaacaggaaaccttgtgattagcacaatgaagccccaccgagcgccagcacaaaca

SEQ ID NO: 27592 - DNA, 122 bp, Homo sapiens
  misc_feature (61)..(62): /note="This region represents a CpG dinucleotide"
  misc_feature (61)..(61): /note="Nucleotide may be methylated to form 5-methylcytosine"
cagatattacagtagctgtcagccaccagcctcttcctgtccccaccagctgccggggcccgctccatttgcatgctaatctggtgcagggagagagactggggactgagggaggaaccatc

SEQ ID NO: 27593 - DNA, 122 bp, Homo sapiens
  misc_feature (61)..(62): /note="This region represents a CpG dinucleotide"
  misc_feature (61)..(61): /note="Nucleotide may be methylated to form 5-methylcytosine"
tgccttaccacttcccattagccaaattccccaacacatatttctgctgggaaagctgaacgcaaactattttgctcatgtacagtgcagccagcttccctgtggctctcagaggagacaca

SEQ ID NO: 27594 - DNA, 122 bp, Homo sapiens
  misc_feature (61)..(62): /note="This region represents a CpG dinucleotide"
  misc_feature (61)..(61): /note="Nucleotide may be methylated to form 5-methylcytosine"
cttgctgggttgcttataacctggccccaggacagcttcctggtagcctccagatacgcacggggacaaatttgttagtttcatgggcaaagagaagaaaaaatacaataccttactgttaa

SEQ ID NO: 27595 - DNA, 122 bp, Homo sapiens
  misc_feature (61)..(62): /note="This region represents a CpG dinucleotide"
  misc_feature (61)..(61): /note="Nucleotide may be methylated to form 5-methylcytosine"
gacagcaacagcaaaaccttcctttggccctcattcacaatacagtgttctgggaggaggcggctgaccagctgactgcagtgatgaagaaaggagtgtcccacaggactctgattcagcag

SEQ ID NO: 27596 - DNA, 122 bp, Homo sapiens
  misc_feature (61)..(62): /note="This region represents a CpG dinucleotide"
  misc_feature (61)..(61): /note="Nucleotide may be methylated to form 5-methylcytosine"
ccatccacccattcattcattcaatcacacaatactggcatgcctctggtgtgctggtgacgggaaacatatgcaaagcagatacccttccatcttggggcatatgttctactgaggggaaa

SEQ ID NO: 27597 - DNA, 122 bp, Homo sapiens
  misc_feature (61)..(62): /note="This region represents a CpG dinucleotide"
  misc_feature (61)..(61): /note="Nucleotide may be methylated to form 5-methylcytosine"
tgaacaacgacagccccaaaataatatccataacacgcccggccgagagccacgccatcccgcaagaaaaggacttttcaagcttacctgcgtgggtcatgaacttccacggaaaacttctt

SEQ ID NO: 27598 - DNA, 122 bp, Homo sapiens
  misc_feature (61)..(62): /note="This region represents a CpG dinucleotide"
  misc_feature (61)..(61): /note="Nucleotide may be methylated to form 5-methylcytosine"
ctcagccctgctgttgtagtagtcacagacagtccgcaagcaaacccctgggctcccgtacggcttcctgtacccaagcaggaggcagccaggctagtctgctgctcccagggctttgcagg

SEQ ID NO: 27599 - DNA, 122 bp, Homo sapiens
  misc_feature (61)..(62): /note="This region represents a CpG dinucleotide"
  misc_feature (61)..(61): /note="Nucleotide may be methylated to form 5-methylcytosine"
ccattcaggtgagcagggctgttgctcagcaggtgagcctgccccgccatggagactcagcgctagagtgagaaccacatctgctcacaccaggggcctgaaccctgctaaccccacggggg

SEQ ID NO: 27600 - DNA, 122 bp, Homo sapiens
  misc_feature (61)..(62): /note="This region represents a CpG dinucleotide"
  misc_feature (61)..(61): /note="Nucleotide may be methylated to form 5-methylcytosine"
cagctctaggctttctcaggcagacatgttaatacagggctggggccatcctacggacatcgccttctgctgctagaagccaggctagagtttggtgcatttctctttagtacagaggtttg

SEQ ID NO: 27601 - DNA, 122 bp, Homo sapiens
  misc_feature (61)..(62): /note="This region represents a CpG dinucleotide"
  misc_feature (61)..(61): /note="Nucleotide may be methylated to form 5-methylcytosine"
gttttgaatgggtcactgactgttggagtggcagggtcctcctgcccatagataaaatggcgtttctgctggttactgcatcatgcaagaacagccgggtggttgctcaccaaacctgaagg

SEQ ID NO: 27602 - DNA, 122 bp, Homo sapiens
  misc_feature (61)..(62): /note="This region represents a CpG dinucleotide"
  misc_feature (61)..(61): /note="Nucleotide may be methylated to form 5-methylcytosine"
gtcacacactccagggacctgctggtacataaagtcggggcagcctggtggggtccgggccgcctggagagtaggtgtcctgagcgctgggcccagcccatcgtgatacatctaatgataaa

SEQ ID NO: 27603 - DNA, 122 bp, Homo sapiens
  misc_feature (61)..(62): /note="This region represents a CpG dinucleotide"
  misc_feature (61)..(61): /note="Nucleotide may be methylated to form 5-methylcytosine"
tgttcttgccgtcaagaaatgctgtctattgcaccaccctttgaatctgtgcttggccaacggacactaagaaagatgacataagccgaggcttgaaaagaacttgtgtgcatcagggcttg

SEQ ID NO: 27604 - DNA, 122 bp, Homo sapiens
  misc_feature (61)..(62): /note="This region represents a CpG dinucleotide"
  misc_feature (61)..(61): /note="Nucleotide may be methylated to form 5-methylcytosine"
tcttgaattcttttctgtgcaaagccaagaaacctcccaggctaagcaaatcttgggtctcgcataccctgcatcattgctagagaacagaggtcttatatctcatctccaggcataagacc

SEQ ID NO: 27605 - DNA, 122 bp, Homo sapiens
  misc_feature (61)..(62): /note="This region represents a CpG dinucleotide"
  misc_feature (61)..(61): /note="Nucleotide may be methylated to form 5-methylcytosine"
gtaaaccaacactacttgtttacttaagcctggtaagtgaatctggacttaaccaacacacgacccgattagacagatctttttacagggtagatagcattagagaagtgccaggtgttaca

SEQ ID NO: 27606 - DNA, 122 bp, Homo sapiens
  misc_feature (61)..(62): /note="This region represents a CpG dinucleotide"
  misc_feature (61)..(61): /note="Nucleotide may be methylated to form 5-methylcytosine"
tggcggagggtggggtgaggtggaggtcatgtcgtacatcctcctaagcagacacatggacgtcagaggcaccagagggtttccacattgacctgcagtcacccatttacacatcccccacc

SEQ ID NO: 27607 - DNA, 122 bp, Homo sapiens
  misc_feature (61)..(62): /note="This region represents a CpG dinucleotide"
  misc_feature (61)..(61): /note="Nucleotide may be methylated to form 5-methylcytosine"
gttcttatctacagacatgcaaatgtcatatcctgtccagcctagaggttcagttgacaacgcttattcccctgtggaaaaccgaatttgcctacattcacacctttgcttcaacagcttga

SEQ ID NO: 27608 - DNA, 122 bp, Homo sapiens
  misc_feature (61)..(62): /note="This region represents a CpG dinucleotide"
  misc_feature (61)..(61): /note="Nucleotide may be methylated to form 5-methylcytosine"
gctcaagtgggagtggccaaggagagtttaaaggaagggttagaaagaagtgagccggatcgggagaccattatgggatggggaagcctttaccatacctaggcctgggaggttgagtggga

SEQ ID NO: 27609 - DNA, 122 bp, Homo sapiens
  misc_feature (61)..(62): /note="This region represents a CpG dinucleotide"
  misc_feature (61)..(61): /note="Nucleotide may be methylated to form 5-methylcytosine"
tctgacctgcagggaggaggccggttccttactgacacagctccttgcttccactaggggcgatggaatcaagtctcagtaggattattaaatatggaatggtagcaagctattttttaatc

SEQ ID NO: 27610 - DNA, 122 bp, Homo sapiens
  misc_feature (61)..(62): /note="This region represents a CpG dinucleotide"
  misc_feature (61)..(61): /note="Nucleotide may be methylated to form 5-methylcytosine"
gttcctcggaaaatgttcttgttatgggcatcgatgacccctggtaaatccggtggacaccgtgacattatgcacgtgattcttgtgttgcaacccacacttttgacttttcccagcttatc

SEQ ID NO: 27611 - DNA, 122 bp, Homo sapiens
  misc_feature (61)..(62): /note="This region represents a CpG dinucleotide"
  misc_feature (61)..(61): /note="Nucleotide may be methylated to form 5-methylcytosine"
cacatacgtgagccctgctgactcacagacatgtgagcaattacagttgtttttaagtctcgtgagtattggggtgatttgttatgcagcattattgttgcagtgcataactcattactaac

SEQ ID NO: 27612 - DNA, 122 bp, Homo sapiens
  misc_feature (61)..(62): /note="This region represents a CpG dinucleotide"
  misc_feature (61)..(61): /note="Nucleotide may be methylated to form 5-methylcytosine"
aatatggcgctcagccccttcaccctcttctggagggctgggggcaggtgctgcccgctgcgtgctgacctttgccctgccatttgcagtttatgaggcgctttcctcatcccattatctca

SEQ ID NO: 27613 - DNA, 122 bp, Homo sapiens
  misc_feature (61)..(62): /note="This region represents a CpG dinucleotide"
  misc_feature (61)..(61): /note="Nucleotide may be methylated to form 5-methylcytosine"
tgactcattccttgcctccggttcactcctcaaacaagtcctgtctggatttggcacccacggctttatgcactgatgaaattagtttcgctgaaggcagggctaatgtcctgttttctagc

SEQ ID NO: 27614 - DNA, 122 bp, Homo sapiens
  misc_feature (61)..(62): /note="This region represents a CpG dinucleotide"
  misc_feature (61)..(61): /note="Nucleotide may be methylated to form 5-methylcytosine"
caaaagctatactgatctgtaactaatctttaacattaaccctatggaaatatctgtaagcgcctaaatggcccacacagtttagtcagttgcagatcctatccactttaagatcatatttg

SEQ ID NO: 27615 - DNA, 122 bp, Homo sapiens
  misc_feature (61)..(62): /note="This region represents a CpG dinucleotide"
  misc_feature (61)..(61): /note="Nucleotide may be methylated to form 5-methylcytosine"
gtactagaaacatggaaccataatcttagatgaacaacgttagaatttgcactaattctacggaatttcagtaattcggcaaatgtcgggcagtgacacaacatttcatgacggggacgcat

SEQ ID NO: 27616 - DNA, 122 bp, Homo sapiens
  misc_feature (61)..(62): /note="This region represents a CpG dinucleotide"
  misc_feature (61)..(61): /note="Nucleotide may be methylated to form 5-methylcytosine"
gcagcatcactccccacacagcgatggcctcctctgggcaaatgggtggggcaggctggacgtgccagggagtcagggcctctgggagcagcccacaaactctgaatgaggcaaattggagc

SEQ ID NO: 27617 - DNA, 122 bp, Homo sapiens
  misc_feature (61)..(62): /note="This region represents a CpG dinucleotide"
  misc_feature (61)..(61): /note="Nucleotide may be methylated to form 5-methylcytosine"
taaaaccctctgcatgaagacttcctgtttctgtaagtcacctacagagacaacattcaccgtaagcttcatcagacactgcattatttcaaagaactaggagttctcagttctcagagcca

SEQ ID NO: 27618 - DNA, 122 bp, Homo sapiens
  misc_feature (61)..(62): /note="This region represents a CpG dinucleotide"
  misc_feature (61)..(61): /note="Nucleotide may be methylated to form 5-methylcytosine"
ggagctggctcattggtattaatggatgaatgggcctcatttgggcagttgtaattaacacgctgactactgagatgagctcagcccgagtcactcctgaatggcataaagcattgctcaac

SEQ ID NO: 27619 - DNA, 122 bp, Homo sapiens
  misc_feature (61)..(62): /note="This region represents a CpG dinucleotide"
  misc_feature (61)..(61): /note="Nucleotide may be methylated to form 5-methylcytosine"
aatgaaatgggatcatgtatataaataaaggcttgcctggggttctttctcagcggagatcgctgcctgcaattctcttccttgcttccttttgccccagccagtgggagcagcctggtggt

SEQ ID NO: 27620 - DNA, 122 bp, Homo sapiens
  misc_feature (61)..(62): /note="This region represents a CpG dinucleotide"
  misc_feature (61)..(61): /note="Nucleotide may be methylated to form 5-methylcytosine"
acaaacaaggaaacaaagaaacaaataattctgctttccgataggtgctggttttacttccgctggctgagctgttgttcctgaggtcagaccccagccagtcttttgtgtacgtgcaggac

SEQ ID NO: 27621 - DNA, 122 bp, Homo sapiens
  misc_feature (61)..(62): /note="This region represents a CpG dinucleotide"
  misc_feature (61)..(61): /note="Nucleotide may be methylated to form 5-methylcytosine"
ctcctggctgcctcccctccccctcggccccattgctgttctggccgtcctattgccgcgcggaatctgcactgccgcttgcttattacgtacaggggaggattgttgacaagtgctccgga

SEQ ID NO: 27622 - DNA, 122 bp, Homo sapiens
  misc_feature (61)..(62): /note="This region represents a CpG dinucleotide"
  misc_feature (61)..(61): /note="Nucleotide may be methylated to form 5-methylcytosine"
caaataaaatattgtgagaaaattgggatacagaaccaggttcaaatccaggctttaccacgtatcagctgtgtgtttttaggcaaatcttaacctcgctgaatctcagttctttcattaat

SEQ ID NO: 27623 - DNA, 122 bp, Homo sapiens
  misc_feature (61)..(62): /note="This region represents a CpG dinucleotide"
  misc_feature (61)..(61): /note="Nucleotide may be methylated to form 5-methylcytosine"
tgaaagtctgtctaccagggaagctcaatggagactcagtgcctcgggcttttcctgggacgtggtcatgcaggcaccttttgcctcatacatactgaaattccagactctcagaaagaaag

SEQ ID NO: 27624 - DNA, 122 bp, Homo sapiens
  misc_feature (61)..(62): /note="This region represents a CpG dinucleotide"
  misc_feature (61)..(61): /note="Nucleotide may be methylated to form 5-methylcytosine"
tggtgtgcatatgttgggggcagggcaagggtaataaataccagggacacttttgcaatgcgtgcctgtcagctgagtgctggacaaacatttttaccactggctatttccctgaggcttct

SEQ ID NO: 27625 - DNA, 122 bp, Homo sapiens
  misc_feature (61)..(62): /note="This region represents a CpG dinucleotide"
  misc_feature (61)..(61): /note="Nucleotide may be methylated to form 5-methylcytosine"
tcccccagagaactctgctctgttagaggaaagaaaccaacctcacatattgaaacaaaacggataggataaaaataaagccctgaagtggtttggtgaccgaggtcatttggggcattaag

SEQ ID NO: 27626 - DNA, 122 bp, Homo sapiens
  misc_feature (61)..(62): /note="This region represents a CpG dinucleotide"
  misc_feature (61)..(61): /note="Nucleotide may be methylated to form 5-methylcytosine"
tgccttactctttgttacacactcctgtcttctttgactaaaaccattattcaatcagaacgtagttatggtgagttcactattaagttttatcttttgcttttgattaactagatacctgt

SEQ ID NO: 27627 - DNA, 122 bp, Homo sapiens
  misc_feature (61)..(62): /note="This region represents a CpG dinucleotide"
  misc_feature (61)..(61): /note="Nucleotide may be methylated to form 5-methylcytosine"
gtgttttgtgttttgtagggtgacctctgttgtagttctatttccagatgatttccctttcgcagattgtcagctgtgcagatcagacctttttgcttaagtccttttgtttgatacgctaa

SEQ ID NO: 27628 - DNA, 122 bp, Homo sapiens
  misc_feature (61)..(62): /note="This region represents a CpG dinucleotide"
  misc_feature (61)..(61): /note="Nucleotide may be methylated to form 5-methylcytosine"
aagttgaaaaaaatgttaaaattcccttgcaagagagtttaacaccccagacacaggctgcgacaatgagcaaggaagatggttattcctgtgggataaggctatacattttagtgttccag

SEQ ID NO: 27629 - DNA, 122 bp, Homo sapiens
  misc_feature (61)..(62): /note="This region represents a CpG dinucleotide"
  misc_feature (61)..(61): /note="Nucleotide may be methylated to form 5-methylcytosine"
tggtatttccttactatccttctagagttgggagaatatgattaatcaaacctgacctgacgaccatgagttttcagagtggttccataggagcttagtgaacctgcatcataggtagaaag

SEQ ID NO: 27630 - DNA, 122 bp, Homo sapiens
  misc_feature (61)..(62): /note="This region represents a CpG dinucleotide"
  misc_feature (61)..(61): /note="Nucleotide may be methylated to form 5-methylcytosine"
gccttttgtcccaataaaaagttagcaagaggaagctactaacccctggtaaaacctccacgtcttgctttcgccaggagctctccccctgtttcaagtctgttcctgtctttcgaccagtc

SEQ ID NO: 27631 - DNA, 122 bp, Homo sapiens
  misc_feature (61)..(62): /note="This region represents a CpG dinucleotide"
  misc_feature (61)..(61): /note="Nucleotide may be methylated to form 5-methylcytosine"
acatgatataagagggaagcctgatttcaccctctcagctggtcatctgtaagatgggaacgacgcatcttgggagaacaacccagaagagagtatcagaaagtgctttccaaattttcaag

SEQ ID NO: 27632 - DNA, 122 bp, Homo sapiens
  misc_feature (61)..(62): /note="This region represents a CpG dinucleotide"
  misc_feature (61)..(61): /note="Nucleotide may be methylated to form 5-methylcytosine"
actgacagaagaatcatagcctactcttgggaaggtacctgacaaaaggatgatgcccaacgagcagggcttggattcagagaaatcatgggattttctctctctaaacacatgaatcacaa

SEQ ID NO: 27633 - DNA, 122 bp, Homo sapiens
  misc_feature (61)..(62): /note="This region represents a CpG dinucleotide"
  misc_feature (61)..(61): /note="Nucleotide may be methylated to form 5-methylcytosine"
catataggttggtttcttcctctcaaattctctgatctctcagctgactataggctttagcggtgccctgtgtgatgacagcagggttttggatatagtaagtaggagccacttttggtatc

SEQ ID NO: 27634 - DNA, 122 bp, Homo sapiens
  misc_feature (61)..(62): /note="This region represents a CpG dinucleotide"
  misc_feature (61)..(61): /note="Nucleotide may be methylated to form 5-methylcytosine"
tcatcctgggcttgcaagcaacctagatttgtagcctaggtacttaatccttatacatcccgcctgctttatcctcaccctcatggatcagagtcagcctttagttgcattgaacagactga

SEQ ID NO: 27635 - DNA, 122 bp, Homo sapiens
  misc_feature (61)..(62): /note="This region represents a CpG dinucleotide"
  misc_feature (61)..(61): /note="Nucleotide may be methylated to form 5-methylcytosine"
aaataaaaatttgcaactgaattggaaaaaatctgacactgaaggatgaaatgtagctttcgtagcatgagatttgtggcacaaactgaccagaggaaggaaatctgatgatctagatagat

SEQ ID NO: 27636 - DNA, 122 bp, Homo sapiens
  misc_feature (61)..(62): /note="This region represents a CpG dinucleotide"
  misc_feature (61)..(61): /note="Nucleotide may be methylated to form 5-methylcytosine"
gaggagcatcctgcaattatatttgggtgagcagctctaacatgactcttcagaccctttcggcacttttctagaaagaacctgaacttgtatacagaaataaagtaccaacatattagatc

SEQ ID NO: 27637 - DNA, 122 bp, Homo sapiens
  misc_feature (61)..(62): /note="This region represents a CpG dinucleotide"
  misc_feature (61)..(61): /note="Nucleotide may be methylated to form 5-methylcytosine"
ctagttaacccatgtcaggtgcatggcacagggcttggtgcgcagtcagggatatgtaagcgctggctgtgattaccatcaggtgtcaggagatttcagcaaatcctacttgtgaagcctca

SEQ ID NO: 27638 - DNA, 122 bp, Homo sapiens
  misc_feature (61)..(62): /note="This region represents a CpG dinucleotide"
  misc_feature (61)..(61): /note="Nucleotide may be methylated to form 5-methylcytosine"
gttgaatagaaaactatagtttgctctcagcaacccacttctgtgtgttttgtttctttccgttgtggtgtcatcctctccacacagttaaactaacagagagtccgtctatctaggttcta

SEQ ID NO: 27639 - DNA, 122 bp, Homo sapiens
  misc_feature (61)..(62): /note="This region represents a CpG dinucleotide"
  misc_feature (61)..(61): /note="Nucleotide may be methylated to form 5-methylcytosine"
gattcatcctccttgctcatccatttaaggtgaattgtgggtctaaagtaggtgactcaacgctggtcagcaagaccttgctgggatggttcacccaagagcattgctcttaggtgatgctg

SEQ ID NO: 27640 - DNA, 122 bp, Homo sapiens
  misc_feature (61)..(62): /note="This region represents a CpG dinucleotide"
  misc_feature (61)..(61): /note="Nucleotide may be methylated to form 5-methylcytosine"
tcagagagcatgaaaaggtgagactaaggaggaaattcttttcacagagaagctcagagccgaaccaatccttggctgtagagaaggaggagctttcagagtttgctggttccaagcttttt

SEQ ID NO: 27641 - DNA, 122 bp, Homo sapiens
  misc_feature (61)..(62): /note="This region represents a CpG dinucleotide"
  misc_feature (61)..(61): /note="Nucleotide may be methylated to form 5-methylcytosine"
catatgaactggacagtgtggaatgagcagacctgtagcacgggaagcagctaaactggacggtgtggaacgggcggacctgtagcacgggaagctgctacaggcactgggaggagaatggg

SEQ ID NO: 27642 - DNA, 122 bp, Homo sapiens
  misc_feature (61)..(62): /note="This region represents a CpG dinucleotide"
  misc_feature (61)..(61): /note="Nucleotide may be methylated to form 5-methylcytosine"
tctatcttttaacctcatcacagtctctatcttcataaatgcatgtgtaatgatgctattcgtgacttgctcattcatattcataacttcataattcagtttacaagtcttcccaccatcct

SEQ ID NO: 27643 - DNA, 122 bp, Homo sapiens
  misc_feature (61)..(62): /note="This region represents a CpG dinucleotide"
  misc_feature (61)..(61): /note="Nucleotide may be methylated to form 5-methylcytosine"
ttatttctggaaatcaaacaccacttgggcacttaagaacagaggtactgaggccgggtgcggtagctcaagcctgtaatcccagcactttgggaggccgaggtgggtggatcacttgagcc

SEQ ID NO: 27644 - DNA, 122 bp, Homo sapiens
  misc_feature (61)..(62): /note="This region represents a CpG dinucleotide"
  misc_feature (61)..(61): /note="Nucleotide may be methylated to form 5-methylcytosine"
aggtgataggtaggaacacctgtttgtacgtctcaaatgctccatgcagtttgcagaatgcgttttttttctggttttttttcctttttttttttttttcgagacagggtcttactcctgtc

SEQ ID NO: 27645 - DNA, 122 bp, Homo sapiens
  misc_feature (61)..(62): /note="This region represents a CpG dinucleotide"
  misc_feature (61)..(61): /note="Nucleotide may be methylated to form 5-methylcytosine"
cgggaggaagcggtccccctcccccaccgtgactctgcgcttcctgccccagccccggggcgggaggagacatttcccgttcacaccaaagttttcctggcagcgcctagacctgggcttag

SEQ ID NO: 27646 - DNA, 122 bp, Homo sapiens
  misc_feature (61)..(62): /note="This region represents a CpG dinucleotide"
  misc_feature (61)..(61): /note="Nucleotide may be methylated to form 5-methylcytosine"
tgtgttttgccgtgcgggcgcagaggtcaggctggctctgtggttagcaggtgcaacccacgcggaaggggaggaggggtttcctgactgagcgagaagccccaagtcagggctgtcctccc

SEQ ID NO: 27647 - DNA, 122 bp, Homo sapiens
  misc_feature (61)..(62): /note="This region represents a CpG dinucleotide"
  misc_feature (61)..(61): /note="Nucleotide may be methylated to form 5-methylcytosine"
ttggcaggaggactacatgtggttgacagattatatctgaaaagggctttggtaattgctcgttctcttcagtgactgtgttgctgacagatgggcacagtgaatattgaaagtgttctgga

SEQ ID NO: 27648 - DNA, 122 bp, Homo sapiens
  misc_feature (61)..(62): /note="This region represents a CpG dinucleotide"
  misc_feature (61)..(61): /note="Nucleotide may be methylated to form 5-methylcytosine"
cttgtaaataaactcttatcagataccttctatttcctaggcactgtgattggccaagggcgtacatctgcatgttctctgctctcctggggatcccaggcagcaggggagagagggaagca

SEQ ID NO: 27649 - DNA, 122 bp, Homo sapiens
  misc_feature (61)..(62): /note="This region represents a CpG dinucleotide"
  misc_feature (61)..(61): /note="Nucleotide may be methylated to form 5-methylcytosine"
tgatggcagaggtaaggagctggctctccaggacagatgtcctcaggttacatgtgcagccgtcaggcttctgcctgagccacctccaagcaaatctgcagccttctggactctgtaatgca

SEQ ID NO: 27650 - DNA, 122 bp, Homo sapiens
  misc_feature (61)..(62): /note="This region represents a CpG dinucleotide"
  misc_feature (61)..(61): /note="Nucleotide may be methylated to form 5-methylcytosine"
ggtttctgtttaagcctggaatttgctctcccagaggatcaaggaccatgttgaggcagtcgggctgtggaaagctctgtggcaccccagcacacttttgatttcaacagcattgtctctag

SEQ ID NO: 27651 - DNA, 122 bp, Homo sapiens
  misc_feature (61)..(62): /note="This region represents a CpG dinucleotide"
  misc_feature (61)..(61): /note="Nucleotide may be methylated to form 5-methylcytosine"
atatagaccgctgtagttttcccctgggaatttccctggacgatgcttcaaaagtgtctccgctactttcttcctcagatccttcctgtctgagctgctggtgtctttggttatgagtccta

SEQ ID NO: 27652 - DNA, 122 bp, Homo sapiens
  misc_feature (61)..(62): /note="This region represents a CpG dinucleotide"
  misc_feature (61)..(61): /note="Nucleotide may be methylated to form 5-methylcytosine"
aggcactcattgactactatgtcacacctataggccacagagcaccagcttgcatggccacgataccatcaccaggcacacccaggtagctactgagtaaaggctggctgccaaagatgaat

SEQ ID NO: 27653 - DNA, 122 bp, Homo sapiens
  misc_feature (61)..(62): /note="This region represents a CpG dinucleotide"
  misc_feature (61)..(61): /note="Nucleotide may be methylated to form 5-methylcytosine"
taagatctgggaggatcccagattaaagcttcctatgtcttcttcctgtgagtcagtacacgtcaccttcctagcacatcaatgggtaaaaatatgtacagaatattgtcaaccagggaaac

SEQ ID NO: 27654 - DNA, 122 bp, Homo sapiens
  misc_feature (61)..(62): /note="This region represents a CpG dinucleotide"
  misc_feature (61)..(61): /note="Nucleotide may be methylated to form 5-methylcytosine"
cccacccgtcttcctgaaccatcgagaaattacgtcttaccaaatcctactgaggactggcgaagaacaaaagggaaccaaatcacagatagatgtgaaggcagatagacaattcaactgtt

SEQ ID NO: 27655 - DNA, 122 bp, Homo sapiens
  misc_feature (61)..(62): /note="This region represents a CpG dinucleotide"
  misc_feature (61)..(61): /note="Nucleotide may be methylated to form 5-methylcytosine"
gcagcagccagcactggggagcagagagctggacctatgttctctggctttctgctttggcgggagaatggggtctaagaataaacaaactaagagagtagagccaaaagggaactttgata

SEQ ID NO: 27656 - DNA, 122 bp, Homo sapiens
  misc_feature (61)..(62): /note="This region represents a CpG dinucleotide"
  misc_feature (61)..(61): /note="Nucleotide may be methylated to form 5-methylcytosine"
actcatgttaacagcataaagatccacctagggtttgccagtggtaagcagtgagcctgacgcaattatcggctatgcctatcagcctatttttctggctggtttggtgtgattacagtggt

SEQ ID NO: 27657 - DNA, 122 bp, Homo sapiens
  misc_feature (61)..(62): /note="This region represents a CpG dinucleotide"
  misc_feature (61)..(61): /note="Nucleotide may be methylated to form 5-methylcytosine"
acttcaccagcaacctaggcatctttcaattcactcaagttgacacctaatattaactaccgcgagaggtaaagctcccgcctaagttagcaaggggagctgatgagtaagaggggacaaaa

SEQ ID NO: 27658 - DNA, 122 bp, Homo sapiens
  misc_feature (61)..(62): /note="This region represents a CpG dinucleotide"
  misc_feature (61)..(61): /note="Nucleotide may be methylated to form 5-methylcytosine"
tagaaaaatgactcatctgactgatgtggtgagttcaactgatggtcttgtagctgcaggcgagaagcccagttacaaggttattgccaagtccaggtgaaaaaagatgagggtttaaatat

SEQ ID NO: 27659 - DNA, 122 bp, Homo sapiens
  misc_feature (61)..(62): /note="This region represents a CpG dinucleotide"
  misc_feature (61)..(61): /note="Nucleotide may be methylated to form 5-methylcytosine"
tgccacttcctccagtgttggcaactctgcggctttctctactcaggaagcacttggagccgccagctgcaggcgctcctgtctccgggcaccgggctctgctggagctgcagcttagcctg

SEQ ID NO: 27660 - DNA, 122 bp, Homo sapiens
  misc_feature (61)..(62): /note="This region represents a CpG dinucleotide"
  misc_feature (61)..(61): /note="Nucleotide may be methylated to form 5-methylcytosine"
caaacaaatatactaataataatgcaaatatgctaaagaggaactgtttctctctatccccggctctcaccagtcatttctggtccaaaaggaagaacccagggactgcttcctgattatgt

SEQ ID NO: 27661 - DNA, 122 bp, Homo sapiens
  misc_feature (61)..(62): /note="This region represents a CpG dinucleotide"
  misc_feature (61)..(61): /note="Nucleotide may be methylated to form 5-methylcytosine"
aaaaaagtaagctgagggctcaagggccacacaggtcttcaagaggcccagcccgggatccgcacacccgagaaccctgtgctgagtcaggatccccttctgtggacacaagataggagtgg

SEQ ID NO: 27662 - DNA, 122 bp, Homo sapiens
  misc_feature (61)..(62): /note="This region represents a CpG dinucleotide"
  misc_feature (61)..(61): /note="Nucleotide may be methylated to form 5-methylcytosine"
cttcctgtgaggtgtcatcagcagcacaagatcagacatagccaggtctacacaggcttgcgtctttccacaagttcactttattgatgcttactcaattagaaaagtcatgagccaggcgt

SEQ ID NO: 27663 - DNA, 122 bp, Homo sapiens
  misc_feature (61)..(62): /note="This region represents a CpG dinucleotide"
  misc_feature (61)..(61): /note="Nucleotide may be methylated to form 5-methylcytosine"
caatgtttgtgtccctccaaaattcatgttaaaatcttaggccctgaagtgatggtattacgtagggccttttgggagatgattagttcattaggtctccacccttataaaagattagcgct

SEQ ID NO: 27664 - DNA, 122 bp, Homo sapiens
  misc_feature (61)..(62): /note="This region represents a CpG dinucleotide"
  misc_feature (61)..(61): /note="Nucleotide may be methylated to form 5-methylcytosine"
agataagcacaaacttgacaagacactacaccatcaggagaaaaagaacaatttgttgagcgtctacaatgtgccaggtcaaggtgccaggtgctttcagatgtgttaccacatctgtcatt

SEQ ID NO: 27665 - DNA, 122 bp, Homo sapiens
  misc_feature (61)..(62): /note="This region represents a CpG dinucleotide"
  misc_feature (61)..(61): /note="Nucleotide may be methylated to form 5-methylcytosine"
ggcctcaggaaacttacaatcatagcagaaggggaagtaggcaccaacctattcacaaggcggcaggagagaaagcatgaaggaggaactgtcaaaaacttataaaaccatcagatcttatg

SEQ ID NO: 27666 - DNA, 122 bp, Homo sapiens
  misc_feature (61)..(62): /note="This region represents a CpG dinucleotide"
  misc_feature (61)..(61): /note="Nucleotide may be methylated to form 5-methylcytosine"
tccattccaaggctctgggcctctggaggtggagttctctcagctggccccgggagacagcgcagtggccagagctctggctcatcaggtcagggaaagaaaatcaccctcagaatctctca

SEQ ID NO: 27667 - DNA, 122 bp, Homo sapiens
  misc_feature (61)..(62): /note="This region represents a CpG dinucleotide"
  misc_feature (61)..(61): /note="Nucleotide may be methylated to form 5-methylcytosine"
aaaatagagctgctctgattgaaattggtggtggtgtggtaaggattagcacccagctcacgtggccacctaaggtgctagagaggccagtctgaaaactcaggaagtgagcgagtaatcag

SEQ ID NO: 27668 - DNA, 122 bp, Homo sapiens
  misc_feature (61)..(62): /note="This region represents a CpG dinucleotide"
  misc_feature (61)..(61): /note="Nucleotide may be methylated to form 5-methylcytosine"
gaagctctatcatgcatacttcttattcatgcaacacttcaggtaacaagcagcagcaaacgttaattcccagggaatgccagcaggacgattcacgtggaggaaatagtttgtgataaaga

SEQ ID NO: 27669 - DNA, 122 bp, Homo sapiens
  misc_feature (61)..(62): /note="This region represents a CpG dinucleotide"
  misc_feature (61)..(61): /note="Nucleotide may be methylated to form 5-methylcytosine"
ctttcagcagtttaataatgtcttatgatctagaattatgacaactttttaacctaccaacggacattgagaaatttcctgatttattttctataccacaatgttgcaacaaacattcttac

SEQ ID NO: 27670 - DNA, 122 bp, Homo sapiens
  misc_feature (61)..(62): /note="This region represents a CpG dinucleotide"
  misc_feature (61)..(61): /note="Nucleotide may be methylated to form 5-methylcytosine"
ccattggtttaatcagtcccctattgatggtttctaatcctttgttattcaaaacagtgccgcaattaatgcacctgtgtatgggtatcatttcctgattgtctctatcatacccttctctt

SEQ ID NO: 27671 - DNA, 122 bp, Homo sapiens
  misc_feature (61)..(62): /note="This region represents a CpG dinucleotide"
  misc_feature (61)..(61): /note="Nucleotide may be methylated to form 5-methylcytosine"
gctgatggggatgaggtgtaactcacacatcctaaaagcttcaacagggcactggagcgccgctgaccaagttactggcattttctattgccaggaagccgcattctcctctctgctaagct

SEQ ID NO: 27672 - DNA, 122 bp, Homo sapiens
  misc_feature (61)..(62): /note="This region represents a CpG dinucleotide"
  misc_feature (61)..(61): /note="Nucleotide may be methylated to form 5-methylcytosine"
accaaacgaaatatcgtaacacaaggcgaggcaggcttgtgggaaccggtccccagcgggcggcggcagagcggggaggattggaggggccagggctgggggtggcacgggctcttgggccg

SEQ ID NO: 27673 - DNA, 122 bp, Homo sapiens
  misc_feature (61)..(62): /note="This region represents a CpG dinucleotide"
  misc_feature (61)..(61): /note="Nucleotide may be methylated to form 5-methylcytosine"
atgggtggctggcacctcatttgaattcatctttgccatgttccctttcaaatgtttcatcgaaacagtgcacctgcagcgtctatcttctttaatctggagtcctttgaagaaaatgtcag

SEQ ID NO: 27674 - DNA, 122 bp, Homo sapiens
  misc_feature (61)..(62): /note="This region represents a CpG dinucleotide"
  misc_feature (61)..(61): /note="Nucleotide may be methylated to form 5-methylcytosine"
agtgagtgagcctagtccaagtttgtttagaaagccatatttgggagaaccatggaagtgcgaacctgatcatgtgaaaagcccaggactgttcagccttctgtggcagttctgtgagttct

SEQ ID NO: 27675 - DNA, 122 bp, Homo sapiens
  misc_feature (61)..(62): /note="This region represents a CpG dinucleotide"
  misc_feature (61)..(61): /note="Nucleotide may be methylated to form 5-methylcytosine"
aattcctaatgctctcctttttttattctccacagtgacagttgtcataactatatctaacgattgtgggacttggagaaaaatgcagagtggaagcaggaggaggtgagaataaggaggcc

SEQ ID NO: 27676 - DNA, 122 bp, Homo sapiens
  misc_feature (61)..(62): /note="This region represents a CpG dinucleotide"
  misc_feature (61)..(61): /note="Nucleotide may be methylated to form 5-methylcytosine"
ttaaagccaattctttccacaatgggatcaaacacagggggatgaagtgccctcagggcccgagttgtgctgagaggagcttgggagcatcccggaccaccaccccaacccctttcctggtg

SEQ ID NO: 27677 - DNA, 122 bp, Homo sapiens
  misc_feature (61)..(62): /note="This region represents a CpG dinucleotide"
  misc_feature (61)..(61): /note="Nucleotide may be methylated to form 5-methylcytosine"
gagactctttggcaattggcaatcatttcaccatttactcacctctgaagacaggaaagccgaggcccatacctctgttgtgaacaaggaccagaaaggagaaatgacatgctcaaggcctt

SEQ ID NO: 27678 - DNA, 122 bp, Homo sapiens
  misc_feature (61)..(62): /note="This region represents a CpG dinucleotide"
  misc_feature (61)..(61): /note="Nucleotide may be methylated to form 5-methylcytosine"
ttttgtgtaatactcttttgagccactgatagccagcagattggatttttcagagcctttcgttccaaagagatctaatattaagcacacagcttagtaaatcccttcaacaagttctcatg

SEQ ID NO: 27679 - DNA, 122 bp, Homo sapiens
  misc_feature (61)..(62): /note="This region represents a CpG dinucleotide"
  misc_feature (61)..(61): /note="Nucleotide may be methylated to form 5-methylcytosine"
ccaatccatttttggaaacatctaggcgtttcttgattaccatgctctggatggccaaatcggggggttttcatgcagtatcacacctggacttcgagccacaagtgaacacttctctgggc

SEQ ID NO: 27680 - DNA, 122 bp, Homo sapiens
  misc_feature (61)..(62): /note="This region represents a CpG dinucleotide"
  misc_feature (61)..(61): /note="Nucleotide may be methylated to form 5-methylcytosine"
ctcctcccctcttcctgtggctttgtggttcattaccactttaaccccagaaacctgagccgccagaggttactgggcattctctgggccacaggctgtgttgggggtcaggactgagagta

SEQ ID NO: 27681 - DNA, 122 bp, Homo sapiens
  misc_feature (61)..(62): /note="This region represents a CpG dinucleotide"
  misc_feature (61)..(61): /note="Nucleotide may be methylated to form 5-methylcytosine"
catgtaaactatagctcaatagtgctattaaacattctacttgagtcatttattcattcccgttttcaaaacacaaattcctaattcagaggtgggatatctcactgaggtttcatgtggct

SEQ ID NO: 27682 - DNA, 122 bp, Homo sapiens
  misc_feature (61)..(62): /note="This region represents a CpG dinucleotide"
  misc_feature (61)..(61): /note="Nucleotide may be methylated to form 5-methylcytosine"
atcatcataactgtttaactaaaattttaaaacatatttcttacctggtatgactaagtacggcctgccctaggaaggaaagcatataaggccattatgaacatgctctactgcattagcag

SEQ ID NO: 27683 - DNA, 122 bp, Homo sapiens
  misc_feature (61)..(62): /note="This region represents a CpG dinucleotide"
  misc_feature (61)..(61): /note="Nucleotide may be methylated to form 5-methylcytosine"
tgagcattaagtgactaaagtatttgtcaagtgcctggcacagagtcaatcttcattagacgacagaactggataaaggaaagcccagtgattctcacacatggctgtgcaacacaatctac

SEQ ID NO: 27684 - DNA, 122 bp, Homo sapiens
  misc_feature (61)..(62): /note="This region represents a CpG dinucleotide"
  misc_feature (61)..(61): /note="Nucleotide may be methylated to form 5-methylcytosine"
gaaaaccaaactgaaatttcgtaagctacagtagcaagtagaaaaccagcaagcctgggacgaggtgtcacactcttccagaggacatgcttactcacaggcagcaactaggtcgggcaaat

SEQ ID NO: 27685 - DNA, 122 bp, Homo sapiens
  misc_feature (61)..(62): /note="This region represents a CpG dinucleotide"
  misc_feature (61)..(61): /note="Nucleotide may be methylated to form 5-methylcytosine"
ctttggtctttgtattcctgtgactagtaatggtgacacaaccctgcattaacaggccagcgtctgctatagatccccagaggacttcaccaatgccctctgatccgggtttcccaacctcg

SEQ ID NO: 27686 - DNA, 122 bp, Homo sapiens
  misc_feature (61)..(62): /note="This region represents a CpG dinucleotide"
  misc_feature (61)..(61): /note="Nucleotide may be methylated to form 5-methylcytosine"
tctcagaatgaccctatttattcatcaaactatttgaacctatggcaaagtttgttccttcgtattttattaaactcaattaagtaatggggtcttttgtcatcagtttcaacttcatcttc

SEQ ID NO: 27687 - DNA, 122 bp, Homo sapiens
  misc_feature (61)..(62): /note="This region represents a CpG dinucleotide"
  misc_feature (61)..(61): /note="Nucleotide may be methylated to form 5-methylcytosine"
cccatcatgactggctttgtctctgcttattaggaccatctaggggatttcagagttccccgctcaatgaaacacctagtgattcattcatgattcacccccatcagttctccactcatgtt

SEQ ID NO: 27688 - DNA, 122 bp, Homo sapiens
  misc_feature (61)..(62): /note="This region represents a CpG dinucleotide"
  misc_feature (61)..(61): /note="Nucleotide may be methylated to form 5-methylcytosine"
actttgtcttgaatgtctctcagtcagattcctgcagaataagcatgcaattggctcatccgacatatccagtgagattatccttgattggcagaatgctagttccacacttcctacaagaa

SEQ ID NO: 27689 - DNA, 122 bp, Homo sapiens
  misc_feature (61)..(62): /note="This region represents a CpG dinucleotide"
  misc_feature (61)..(61): /note="Nucleotide may be methylated to form 5-methylcytosine"
caaagccattctgtgactcgctttcatttgcttcctacggtaacccggtaagataggtgtcgtcattcccatttcagagaagaataaactgaggctcagagaaacttagagatgtgccagga

SEQ ID NO: 27690 - DNA, 122 bp, Homo sapiens
  misc_feature (61)..(62): /note="This region represents a CpG dinucleotide"
  misc_feature (61)..(61): /note="Nucleotide may be methylated to form 5-methylcytosine"
ttctttaaagctcacattttatagtatcactgctacaaactatttaatgaaatgtggcatcgggtgaaaagaggcatttgtttgatccttgaacgaattaatctcacgtacttccctgtttg

SEQ ID NO: 27691 - DNA, 122 bp, Homo sapiens
  misc_feature (61)..(62): /note="This region represents a CpG dinucleotide"
  misc_feature (61)..(61): /note="Nucleotide may be methylated to form 5-methylcytosine"
tcctctgtggttacatgggtcatattgcctgtatatcactctcttctgcagtctaccaagcgttataaacagcatgtgatccatgggtctgctatcaaaacaaatacatttcacgagatgtg

SEQ ID NO: 27692 - DNA, 122 bp, Homo sapiens
  misc_feature (61)..(62): /note="This region represents a CpG dinucleotide"
  misc_feature (61)..(61): /note="Nucleotide may be methylated to form 5-methylcytosine"
ccccatgttggaatcccagctctgccattcacagctgtaaaattcagagcaagtaacttccgtggcctcagtttcctcatcttaaaatgggcattgtgacatttatctcctaggatcacaat

SEQ ID NO: 27693 - DNA, 122 bp, Homo sapiens
  misc_feature (61)..(62): /note="This region represents a CpG dinucleotide"
  misc_feature (61)..(61): /note="Nucleotide may be methylated to form 5-methylcytosine"
agcaacttgttagtcagaaggaattaagaatctttgcttccactttagctccagcccagacgtcctgaacttagagccaagcctacggcacctctgcaggtcacagagagatgcagaattgt

SEQ ID NO: 27694 - DNA, 122 bp, Homo sapiens
  misc_feature (61)..(62): /note="This region represents a CpG dinucleotide"
  misc_feature (61)..(61): /note="Nucleotide may be methylated to form 5-methylcytosine"
aggttttggtactccctgcactcaccttcagacacctgcattactgtttgacaggtgtaccgcaccagtccgactctgcacttggcactattccaggaccagttaacatccagccagcatgt

SEQ ID NO: 27695 - DNA, 122 bp, Homo sapiens
  misc_feature (61)..(62): /note="This region represents a CpG dinucleotide"
  misc_feature (61)..(61): /note="Nucleotide may be methylated to form 5-methylcytosine"
tacaacctcaagacctatgaagccagtgaggcctgaggctatgtacaaagctacaatgcccgtgaacagcactgcaggggttcggaaggtgctgaagacgttcttgctaccattgtgcttgc

SEQ ID NO: 27696 - DNA, 122 bp, Homo sapiens
  misc_feature (61)..(62): /note="This region represents a CpG dinucleotide"
  misc_feature (61)..(61): /note="Nucleotide may be methylated to form 5-methylcytosine"
ttactgacagactaaatgtaaataatggccaaaatctctcagcaaatcaagtggtgagctcgcccaggtgctggagagggaggaatccagatcctaatctcagtgattgctgtcttcagcta

SEQ ID NO: 27697 - DNA, 122 bp, Homo sapiens
  misc_feature (61)..(62): /note="This region represents a CpG dinucleotide"
  misc_feature (61)..(61): /note="Nucleotide may be methylated to form 5-methylcytosine"
ctccagggtgttcccagtcattttcacattagcagttgctctgtggtacagacgtggctgcgcctctgtggatcattgaaccttcaccattgccccagcctgcttggggctagggtgtgtgg

SEQ ID NO: 27698 - DNA, 122 bp, Homo sapiens
  misc_feature (61)..(62): /note="This region represents a CpG dinucleotide"
  misc_feature (61)..(61): /note="Nucleotide may be methylated to form 5-methylcytosine"
gtgacagctcttgtctcctttcccactctttgaaggtaactattatacttaactctttggcgtatagtcttccaaatatatttctttttctgtttgttttcttctccagataaagtttcccc

SEQ ID NO: 27699 - DNA, 122 bp, Homo sapiens
  misc_feature (61)..(62): /note="This region represents a CpG dinucleotide"
  misc_feature (61)..(61): /note="Nucleotide may be methylated to form 5-methylcytosine"
atggcctccacagagccccctgaaccaggaagaccactctaggtcagcatgtcattgcaacgactcaaaagggaagtaggctgagaatgatgaatgtcacaggactaggggagatcaagtca

SEQ ID NO: 27700 - DNA, 122 bp, Homo sapiens
  misc_feature (61)..(62): /note="This region represents a CpG dinucleotide"
  misc_feature (61)..(61): /note="Nucleotide may be methylated to form 5-methylcytosine"
aaggattatacacttttaagaactcctgtgaagcaatccaatgagatttgtaacctcccccgttgctggcctctcctgcatttgattccaggctctagagaacagtgattctcaactctttt

SEQ ID NO: 27701 - DNA, 122 bp, Homo sapiens
  misc_feature (61)..(62): /note="This region represents a CpG dinucleotide"
  misc_feature (61)..(61): /note="Nucleotide may be methylated to form 5-methylcytosine"
cctgggcaacagagcgagactctgtctcaaaagaaacaaacaaaagaactggaggtggcccggcccctgcgtctaacagtcctgggccctccacaccagcacaggaactcaagcctgcagtc

SEQ ID NO: 27702 - DNA, 122 bp, Homo sapiens
  misc_feature (61)..(62): /note="This region represents a CpG dinucleotide"
  misc_feature (61)..(61): /note="Nucleotide may be methylated to form 5-methylcytosine"
tttctaccaagcctttgtgaacattgctcttcattttggcctgtacttctccctcagggacgtagaacaatggaatgtcagtcagtctctgtagttaaaactttttctttaaaattcaatta

SEQ ID NO: 27703 - DNA, 122 bp, Homo sapiens
  misc_feature (61)..(62): /note="This region represents a CpG dinucleotide"
  misc_feature (61)..(61): /note="Nucleotide may be methylated to form 5-methylcytosine"
tgcaaactctaaatctgaggcagccgtgaagtcccatgccctgaatcatctcatccttagcgtcatcagcaagaagggaggacactgagaatcaaaggttttatttattgaactcgagcatg

SEQ ID NO: 27704 - DNA, 122 bp, Homo sapiens
  misc_feature (61)..(62): /note="This region represents a CpG dinucleotide"
  misc_feature (61)..(61): /note="Nucleotide may be methylated to form 5-methylcytosine"
tcattctatgagctgatctgtcctgacagctgccaaattagtcctctcattcctggagctcgctttggcactctcacgaatgtttctttcaaagtccactcttcatttaaaacgttgctcag

SEQ ID NO: 27705 - DNA, 122 bp, Homo sapiens
  misc_feature (61)..(62): /note="This region represents a CpG dinucleotide"
  misc_feature (61)..(61): /note="Nucleotide may be methylated to form 5-methylcytosine"
ttaataaagcactgtcagtaggtcggcttgtcttctctgtcggccacatcaaaatcaatacgtcccctgtgtattctgccatgattgtctgggctggggaatctaataggattaagtgtttg

SEQ ID NO: 27706 - DNA, 122 bp, Homo sapiens
  misc_feature (61)..(62): /note="This region represents a CpG dinucleotide"
  misc_feature (61)..(61): /note="Nucleotide may be methylated to form 5-methylcytosine"
tcttcacgagtgccacagaatagaagaagtaatcagtttagttccagataaggcaaatcacggctgtaaaatcactaaattagacatggcccttcaggtaagctgcttggggaagcaagtga

SEQ ID NO: 27707 - DNA, 122 bp, Homo sapiens
  misc_feature (61)..(62): /note="This region represents a CpG dinucleotide"
  misc_feature (61)..(61): /note="Nucleotide may be methylated to form 5-methylcytosine"
ggaatgggcacaatagctctaccagtctccttgacacccttcgagatcgcaagcactccacggactcctggtgccttagttgagcaggatttagtgactcaatgcccagcactggaagcctg

SEQ ID NO: 27708 - DNA, 122 bp, Homo sapiens
  misc_feature (61)..(62): /note="This region represents a CpG dinucleotide"
  misc_feature (61)..(61): /note="Nucleotide may be methylated to form 5-methylcytosine"
gtaattcgttgactggaattagcatttatgatgacctacaaactagtcagacctcttgagcgcacagcagtcttaggtgagtaatgattgcttattagagaggactggatatgttttaaatg

SEQ ID NO: 27709 - DNA, 122 bp, Homo sapiens
  misc_feature (61)..(62): /note="This region represents a CpG dinucleotide"
  misc_feature (61)..(61): /note="Nucleotide may be methylated to form 5-methylcytosine"
ccattcccttcctggaagtcctgactttaaaacctcgtcagtctgcagtggaagtggcagcgactcccattttgtgaatgcctttggtgtcgggttttgtgtcatttccttccgtgctttgc

SEQ ID NO: 27710 - DNA, 122 bp, Homo sapiens
  misc_feature (61)..(62): /note="This region represents a CpG dinucleotide"
  misc_feature (61)..(61): /note="Nucleotide may be methylated to form 5-methylcytosine"
taggctcctactgccttagtaagtctcgtaataagttacctaataaaaatggtgtaaattcgttttcggcttggttctcaaagaaatcaggagacatgtcagcttcttaatgaccttatagc

SEQ ID NO: 27711 - DNA, 122 bp, Homo sapiens
  misc_feature (61)..(62): /note="This region represents a CpG dinucleotide"
  misc_feature (61)..(61): /note="Nucleotide may be methylated to form 5-methylcytosine"
tgggtccagaaccacagaaccactgacaggggttgactgagaactcgccagaagcaagaacgatccctgctcctgaggagcctgattgggaaacacacactggagtgatgaaagctgggttc

SEQ ID NO: 27712 - DNA, 122 bp, Homo sapiens
  misc_feature (61)..(62): /note="This region represents a CpG dinucleotide"
  misc_feature (61)..(61): /note="Nucleotide may be methylated to form 5-methylcytosine"
attgtctctgagcctcatggtcaccctgcaaggtaggtattattatctttcctactttaccgatgagaagaatggggagcatgacttacctatagtcacccaaacagacaagtggctgagct

SEQ ID NO: 27713 - DNA, 122 bp, Homo sapiens
  misc_feature (61)..(62): /note="This region represents a CpG dinucleotide"
  misc_feature (61)..(61): /note="Nucleotide may be methylated to form 5-methylcytosine"
acagggaggctcttccagttccccgcttcctcccccagtgccctgctggccacttgagcccgctgcctgagtctgatcccacagcactggtgagctttggccaacaggcactgctcggctgc

SEQ ID NO: 27714 - DNA, 122 bp, Homo sapiens
  misc_feature (61)..(62): /note="This region represents a CpG dinucleotide"
  misc_feature (61)..(61): /note="Nucleotide may be methylated to form 5-methylcytosine"
ttctggaggcttagttacgcaattgccggctctgtcatcttctacagggatgtgaccttacggaaaagtaaggaatctgaagcgtggcagatcactttgaagcttgcccagtttttgcatgt

SEQ ID NO: 27715 - DNA, 122 bp, Homo sapiens
  misc_feature (61)..(62): /note="This region represents a CpG dinucleotide"
  misc_feature (61)..(61): /note="Nucleotide may be methylated to form 5-methylcytosine"
taaggcccgtttatccaggaagccagaaccagtgcacatctgttaagcgcatgcaccaagcggcgattccatagttgtatagtgattgtctttatggaactccagaatagcttcttagatat

SEQ ID NO: 27716 - DNA, 122 bp, Homo sapiens
  misc_feature (61)..(62): /note="This region represents a CpG dinucleotide"
  misc_feature (61)..(61): /note="Nucleotide may be methylated to form 5-methylcytosine"
ttatcaccatctaacttttgacgttattttaatattttcttgctgctttgtctcccctgtcgtgtgctctttttgtattgcattcagattgactcatcagcctgtaagtaggccagtaaact

SEQ ID NO: 27717 - DNA, 122 bp, Homo sapiens
  misc_feature (61)..(62): /note="This region represents a CpG dinucleotide"
  misc_feature (61)..(61): /note="Nucleotide may be methylated to form 5-methylcytosine"
actagttcagaggctggagtgtgggatgcaaggagtgaaattgtaaggtggggctggccacgctgagactttgtcactaacctcagagaaacaggaagcaagtaagactgaacagaaggggg

SEQ ID NO: 27718 - DNA, 122 bp, Homo sapiens
  misc_feature (61)..(62): /note="This region represents a CpG dinucleotide"
  misc_feature (61)..(61): /note="Nucleotide may be methylated to form 5-methylcytosine"
ccacctctttctgctctgtctggctaataccttctaaagccaggtatcagcttagactgccgcttgccccatacttgtgtgggtgcctctccttggtgctggcattacaccctgtgctcagt

SEQ ID NO: 27719 - DNA, 122 bp, Homo sapiens
  misc_feature (61)..(62): /note="This region represents a CpG dinucleotide"
  misc_feature (61)..(61): /note="Nucleotide may be methylated to form 5-methylcytosine"
ggacatttgggaccttgtatgggaggagtcagtaaaaagccattcaagtgaaaggcaaaccggaagagagtgtcatcatgaacctaagccaggatgtttttttaggatgaagggtgtggtca

SEQ ID NO: 27720 - DNA, 122 bp, Homo sapiens
  misc_feature (61)..(62): /note="This region represents a CpG dinucleotide"
  misc_feature (61)..(61): /note="Nucleotide may be methylated to form 5-methylcytosine"
aactgtcagacagaccgtcctgtcgtggcatgacttgaacataaccgtcccacgtggggacgcattccgcaccggttgctggaactgacgggggctgcagtgctgaatacctctgggacgct

SEQ ID NO: 27721 - DNA, 122 bp, Homo sapiens
  misc_feature (61)..(62): /note="This region represents a CpG dinucleotide"
  misc_feature (61)..(61): /note="Nucleotide may be methylated to form 5-methylcytosine"
ccttctgcttgatataacagagttgtcatgagtctggctgtgccatggaaactggtttgacgtcactaattctgcttagatggaggattagagctagacaacacggttgatttaaagggcga

SEQ ID NO: 27722 - DNA, 122 bp, Homo sapiens
  misc_feature (61)..(62): /note="This region represents a CpG dinucleotide"
  misc_feature (61)..(61): /note="Nucleotide may be methylated to form 5-methylcytosine"
tacttaccagcaaagcaaacttttcttctatgagcttccatcactcaagaaactttcctgcgcctactgaaaaggcaaacagccttttgagatctggaaaggctggatccatgagttttgta

SEQ ID NO: 27723 - DNA, 122 bp, Homo sapiens
  misc_feature (61)..(62): /note="This region represents a CpG dinucleotide"
  misc_feature (61)..(61): /note="Nucleotide may be methylated to form 5-methylcytosine"
atgggggcttcaaatatcagcccccagtcagaagctgcaaccccagtgctctgctcagagcggctgtgatccagctccgacacccacggggtgaagtcatggggattaactgacttaactgt

SEQ ID NO: 27724 - DNA, 122 bp, Homo sapiens
  misc_feature (61)..(62): /note="This region represents a CpG dinucleotide"
  misc_feature (61)..(61): /note="Nucleotide may be methylated to form 5-methylcytosine"
aaggcctagggaagttttcacagcctaaaacacagtcagtatacttactgttcttagaaacgtaacactccccgacgctgagatgcagacagctaagatgccagggattcaagtatgttatt

SEQ ID NO: 27725 - DNA, 122 bp, Homo sapiens
  misc_feature (61)..(62): /note="This region represents a CpG dinucleotide"
  misc_feature (61)..(61): /note="Nucleotide may be methylated to form 5-methylcytosine"
cttcagaccttttccattgctcctatttattcattccagtggctttctctttataaatgacgtcattgttaaatcacgttgccttgtgtaatggggccattttagttcttaattaaataaca

SEQ ID NO: 27726 - DNA, 122 bp, Homo sapiens
  misc_feature (61)..(62): /note="This region represents a CpG dinucleotide"
  misc_feature (61)..(61): /note="Nucleotide may be methylated to form 5-methylcytosine"
ccgtcaactgccgaatacaagtattttccagtcagaaactcccattccagaatctcctctcgctggcggggctgaaacctcatgaaggagggagggattcccagctggaggtcctctttatg

SEQ ID NO: 27727 - DNA, 122 bp, Homo sapiens
  misc_feature (61)..(62): /note="This region represents a CpG dinucleotide"
  misc_feature (61)..(61): /note="Nucleotide may be methylated to form 5-methylcytosine"
ggcaaagaatgactttcctgttactctggctcccagggtgaacacaggtaaggaaagtgacgaggcagtcaagagcaaagcccagctccctagggctttgtgaggaagaccagctccaccac

SEQ ID NO: 27728 - DNA, 122 bp, Homo sapiens
  misc_feature (61)..(62): /note="This region represents a CpG dinucleotide"
  misc_feature (61)..(61): /note="Nucleotide may be methylated to form 5-methylcytosine"
cttgtggctgccctgtcagagtctttcgctccagtgacaggaaatttcataatttcctttcgtagatagtactggataaaaactgccaacttctgtcttttttaaccatcaatattttacat

SEQ ID NO: 27729 - DNA, 122 bp, Homo sapiens
  misc_feature (61)..(62): /note="This region represents a CpG dinucleotide"
  misc_feature (61)..(61): /note="Nucleotide may be methylated to form 5-methylcytosine"
ccgctcctgatcccggaggctgcagagcagtaattgtcacttagccacttaactccccgccgcactgctcactcactcatcgtggtttatctctcagccaattactgctgtcatttgcgttt

SEQ ID NO: 27730 - DNA, 122 bp, Homo sapiens
  misc_feature (61)..(62): /note="This region represents a CpG dinucleotide"
  misc_feature (61)..(61): /note="Nucleotide may be methylated to form 5-methylcytosine"
ctattcagttcctgagtcaccatgattactagccagtgtcacaaatctctgagatttagacgaatctgattactgcttctgctctcactgaccttggcattaactgttaagtgccactacag

SEQ ID NO: 27731 - DNA, 122 bp, Homo sapiens
  misc_feature (61)..(62): /note="This region represents a CpG dinucleotide"
  misc_feature (61)..(61): /note="Nucleotide may be methylated to form 5-methylcytosine"
gactgcgcctccctggggcacaggttgaacagttcacctacagcactgacatggcctaagcgaatgtcctgtcaatctgagagccaggtttctccctgtcacaggaagaaactacacataag

SEQ ID NO: 27732 - DNA, 122 bp, Homo sapiens
  misc_feature (61)..(62): /note="This region represents a CpG dinucleotide"
  misc_feature (61)..(61): /note="Nucleotide may be methylated to form 5-methylcytosine"
tttctctttcttttcattgatttacccacaaagtttcacttccaaagaggatatgatacacgtagaagcattagacaaatggctgagtatgttcagaggaagtaagcactgtctcaaattgc

SEQ ID NO: 27733 - DNA, 122 bp, Homo sapiens
  misc_feature (61)..(62): /note="This region represents a CpG dinucleotide"
  misc_feature (61)..(61): /note="Nucleotide may be methylated to form 5-methylcytosine"
gcttccacctcctgggaaggaggcccagctgagagcctgccggaagccacagcttcctctcgcactttcgccaggcaggcagcaggtgtgggcctggccccggctgggctgggccggaacct

SEQ ID NO: 27734 - DNA, 122 bp, Homo sapiens
  misc_feature (61)..(62): /note="This region represents a CpG dinucleotide"
  misc_feature (61)..(61): /note="Nucleotide may be methylated to form 5-methylcytosine"
cattggctccgtgatgcagagccggagaatctcaagagcagaagggtcccttgtcatctacgaatgctggaaaccctcctgcagccacacatgttaacaaagggagctcagaaagtttcgtt

SEQ ID NO: 27735 - DNA, 122 bp, Homo sapiens
  misc_feature (61)..(62): /note="This region represents a CpG dinucleotide"
  misc_feature (61)..(61): /note="Nucleotide may be methylated to form 5-methylcytosine"
gtgacagtttaatgctactaccaattctctttgataacttgagtgttttaaaggaatggccgaacaactaaccttaaaatattcaggttctatcttatataaatacagattgttttaaaaga

SEQ ID NO: 27736 - DNA, 122 bp, Homo sapiens
  misc_feature (61)..(62): /note="This region represents a CpG dinucleotide"
  misc_feature (61)..(61): /note="Nucleotide may be methylated to form 5-methylcytosine"
gctgcatccagagtcctcattttttgccagttcttgtatctccaaaacgaatgtgtcattcgtttcatccttctgtgaatacattcaagtgagtattttccgttttattcattttcttctgc

SEQ ID NO: 27737 - DNA, 122 bp, Homo sapiens
  misc_feature (61)..(62): /note="This region represents a CpG dinucleotide"
  misc_feature (61)..(61): /note="Nucleotide may be methylated to form 5-methylcytosine"
agttcttagtaaccaggctgtggccctctgatgtaactttagagaatgattaacatgtcacgtggttagctgggctctgagatgatctctgtaacaaagcagtctacattgttctcccaagg

SEQ ID NO: 27738 - DNA, 122 bp, Homo sapiens
  misc_feature (61)..(62): /note="This region represents a CpG dinucleotide"
  misc_feature (61)..(61): /note="Nucleotide may be methylated to form 5-methylcytosine"
aaatggggttttccttcaggtgagagtggaggccacaaaccacaaaagtaccagcagcgccggtgaaaccacagagtcttgcagcaacggaaaccacagagacttgcagcacacaatagtta

SEQ ID NO: 27739 - DNA, 122 bp, Homo sapiens
  misc_feature (61)..(62): /note="This region represents a CpG dinucleotide"
  misc_feature (61)..(61): /note="Nucleotide may be methylated to form 5-methylcytosine"
tccttggcagccccttcccaaagggaaatacagtgaaatttagagggagccctccttccccgaaaggaggaagcaaacactctgggtgctgttgctttggcttggttcctttggagtgaggt

SEQ ID NO: 27740 - DNA, 122 bp, Homo sapiens
  misc_feature (61)..(62): /note="This region represents a CpG dinucleotide"
  misc_feature (61)..(61): /note="Nucleotide may be methylated to form 5-methylcytosine"
cagacagccgaggcccttttcggcaccaggtgagtcggggtgagtcaggctcctgcaagtcgtaggtgttgcttccgtgctgagatcacgttctttgttttgttttgtgcccgtggcttgtt

SEQ ID NO: 27741 - DNA, 122 bp, Homo sapiens
  misc_feature (61)..(62): /note="This region represents a CpG dinucleotide"
  misc_feature (61)..(61): /note="Nucleotide may be methylated to form 5-methylcytosine"
catctagttcttttgtctcctggagtatgggcagtgacttgtggaaactctgcttcctttcgtactccctaggatgagctgtggtgtgataaagatgactcgggcagcaggcaaacctggtt

SEQ ID NO: 27742 - DNA, 122 bp, Homo sapiens
  misc_feature (61)..(62): /note="This region represents a CpG dinucleotide"
  misc_feature (61)..(61): /note="Nucleotide may be methylated to form 5-methylcytosine"
tttgctgtcattctcttaaattgcctctttctcaaagcatccgggttctggagatgttctcgtgcttaaagtgtgtttctaagtagcttctgggaaccacgtaaaattgtctggctccactt

SEQ ID NO: 27743 - DNA, 122 bp, Homo sapiens
  misc_feature (61)..(62): /note="This region represents a CpG dinucleotide"
  misc_feature (61)..(61): /note="Nucleotide may be methylated to form 5-methylcytosine"
acactgtagacactgctggcctattagtcactctgtagccctctgagctctcagatcaaccgttgcagtatcactgtgcctgtgttcaagtaactcttattttacttcataagggcaccaaa

SEQ ID NO: 27744 - DNA, 122 bp, Homo sapiens
  misc_feature (61)..(62): /note="This region represents a CpG dinucleotide"
  misc_feature (61)..(61): /note="Nucleotide may be methylated to form 5-methylcytosine"
atgctccacccactcaactctggcatccatgagggtcatgtgtagttcacagatgattcacgggaccatgtcaatggactcccattcggaatcaagaaagactcagcccttcccccagggtg

SEQ ID NO: 27745 - DNA, 122 bp, Homo sapiens
  misc_feature (61)..(62): /note="This region represents a CpG dinucleotide"
  misc_feature (61)..(61): /note="Nucleotide may be methylated to form 5-methylcytosine"
tcaggttttcttcatgagcagtaatgagtgagtcagagaggaaatggcatcatctaaatacggtggcattgttgcatgcagaatgtttcactttcaaacgcttggactaaatgtgctcagtc

SEQ ID NO: 27746 - DNA, 122 bp, Homo sapiens
  misc_feature (61)..(62): /note="This region represents a CpG dinucleotide"
  misc_feature (61)..(61): /note="Nucleotide may be methylated to form 5-methylcytosine"
attagtagagtagggaagccatctgcctagaagcacttggtaatgagcaacagctagaaccgtccagttgcaaagaactcatgcttctgtgcctcagggcaaaaaatgactgtaatgctgct

SEQ ID NO: 27747 - DNA, 122 bp, Homo sapiens
  misc_feature (61)..(62): /note="This region represents a CpG dinucleotide"
  misc_feature (61)..(61): /note="Nucleotide may be methylated to form 5-methylcytosine"
aagaggatcacttgagcccaggagtttgtgaccacccttgtcaacatggcgaaaccctgccgctaaaaaaatacaaaaattagccaggtgtggtggtgcacgcccatagtcccagctactcg

SEQ ID NO: 27748 - DNA, 122 bp, Homo sapiens
  misc_feature (61)..(62): /note="This region represents a CpG dinucleotide"
  misc_feature (61)..(61): /note="Nucleotide may be methylated to form 5-methylcytosine"
attaacacctgatgtcttgcaaactggtactctttgggctatctggcttttataaacaaacgcaaactaacataacagaatcaggaagagaagactaagcagggaagggagaaggggtgtca

SEQ ID NO: 27749 - DNA, 122 bp, Homo sapiens
  misc_feature (61)..(62): /note="This region represents a CpG dinucleotide"
  misc_feature (61)..(61): /note="Nucleotide may be methylated to form 5-methylcytosine"
cagacaccaggctccatgttttcaaaaggcctaaaaacagcacaaaataaaatataacaacgattgttcatgtaaagggccacgtgccatctctgtcctgagcaaatgtaacctgaaaccct

SEQ ID NO: 27750 - DNA, 122 bp, Homo sapiens
  misc_feature (61)..(62): /note="This region represents a CpG dinucleotide"
  misc_feature (61)..(61): /note="Nucleotide may be methylated to form 5-methylcytosine"
taagcttctattcattgacaaaacaaaacaaagctctgcctcttcacttttattagactccgatattcactgaaggcattcagcaactctgatagcaacgttctcagcagcctggcccctct

SEQ ID NO: 27751 - DNA, 122 bp, Homo sapiens
  misc_feature (61)..(62): /note="This region represents a CpG dinucleotide"
  misc_feature (61)..(61): /note="Nucleotide may be methylated to form 5-methylcytosine"
taacttctctgccagattttggtttccacagataatgaagtcagtttatcagggccagtgcgcctcctccaccagtttggagggtaatctacacagaagaaaagatgcctgaggttcttatt

SEQ ID NO: 27752 - DNA, 122 bp, Homo sapiens
  misc_feature (61)..(62): /note="This region represents a CpG dinucleotide"
  misc_feature (61)..(61): /note="Nucleotide may be methylated to form 5-methylcytosine"
tccagctgatacagtttgactgtgtccccatctaaattgcatctggtattgtaatcctttcgatttaggctattgcgccacagagcctgcttgcaggaattgtaatcctatttgtaatcccc

SEQ ID NO: 27753 - DNA, 122 bp, Homo sapiens
  misc_feature (61)..(62): /note="This region represents a CpG dinucleotide"
  misc_feature (61)..(61): /note="Nucleotide may be methylated to form 5-methylcytosine"
tatgacccatggtgtagtcctggcagttcaagcactccccagtcactgggtcgcagtcatcggcgtggccattgcactggcagggctggcaacttggaaagccccagtgcccaggtaagcac

SEQ ID NO: 27754 - DNA, 122 bp, Homo sapiens
  misc_feature (61)..(62): /note="This region represents a CpG dinucleotide"
  misc_feature (61)..(61): /note="Nucleotide may be methylated to form 5-methylcytosine"
cgaaaccaacaaagctcagcttgtctcacagcttctggggagtgggtaagaagagtagaacgtgtatccaatgttctaatattttcagagagcttcctgaaggacaggtttcagtcttgact

SEQ ID NO: 27755 - DNA, 122 bp, Homo sapiens
  misc_feature (61)..(62): /note="This region represents a CpG dinucleotide"
  misc_feature (61)..(61): /note="Nucleotide may be methylated to form 5-methylcytosine"
cccaaaaaaatctttttaaaaaaccccacttaattgaggttaagatccttttgaccacttcgcagacatccttttaaagctccttctgattggattaaaaactcctctggcaagcctctagc

SEQ ID NO: 27756 - DNA, 122 bp, Homo sapiens
  misc_feature (61)..(62): /note="This region represents a CpG dinucleotide"
  misc_feature (61)..(61): /note="Nucleotide may be methylated to form 5-methylcytosine"
tatcactttcctgtatctaacactaataccacttaggactgcaatagttttctcagcacacgtcactttgtttccctgcttctccaagtctagggtatgcagtgtgcctgagcttgctggtg

SEQ ID NO: 27757 - DNA, 122 bp, Homo sapiens
  misc_feature (61)..(62): /note="This region represents a CpG dinucleotide"
  misc_feature (61)..(61): /note="Nucleotide may be methylated to form 5-methylcytosine"
gggaaataatcctagaacatgagtgagtcataagcaacatgagtcctacccttcagcacacgagaggaagcagaagtttgtctatcctatagtgtcccaaagttgaatgtaggagtaaaagc

SEQ ID NO: 27758 - DNA, 122 bp, Homo sapiens
  misc_feature (61)..(62): /note="This region represents a CpG dinucleotide"
  misc_feature (61)..(61): /note="Nucleotide may be methylated to form 5-methylcytosine"
gcgtgatttttccagcactcttgcacttcgtggggcctgctcctgactgtgaggagagttcgaagggaggggaacaggaagagagggcaggaacacaagagcttgtttttttatttttgaca

SEQ ID NO: 27759 - DNA, 122 bp, Homo sapiens
  misc_feature (61)..(62): /note="This region represents a CpG dinucleotide"
  misc_feature (61)..(61): /note="Nucleotide may be methylated to form 5-methylcytosine"
tcaaaaacctttaagaatgaaacattaggcaaatgccagggccactctcagaaaactacacgctagttgtagtaattagctccaggcatgcccttcccgccccctgttattaaacagcatga

SEQ ID NO: 27760 - DNA, 122 bp, Homo sapiens
  misc_feature (61)..(62): /note="This region represents a CpG dinucleotide"
  misc_feature (61)..(61): /note="Nucleotide may be methylated to form 5-methylcytosine"
atctggcaaagatctcaggcactgaaggaaccagctgttccgtagcaatgtgattttgcacgcttcttggggcctggcattcttaaacttccaccagcgttaattcttactggtgagttttc

SEQ ID NO: 27761 - DNA, 122 bp, Homo sapiens
  misc_feature (61)..(62): /note="This region represents a CpG dinucleotide"
  misc_feature (61)..(61): /note="Nucleotide may be methylated to form 5-methylcytosine"
tgcacgtggctagggggtgcggactgctggcctccggcaggtgtcttatcaaaagcactccgtctggtgttgcttcctgttacttacccaccaatatctaccctgtgatatttctgtttctt

SEQ ID NO: 27762 - DNA, 122 bp, Homo sapiens
  misc_feature (61)..(62): /note="This region represents a CpG dinucleotide"
  misc_feature (61)..(61): /note="Nucleotide may be methylated to form 5-methylcytosine"
gtcagggggcagaaggaaaccatgggcaagagcctttattatcgtttccgagggaaggaacgggtgaggcagagaatccaggtttaggattagctaattagaataatttcagcaggctctga

SEQ ID NO: 27763 - DNA, 122 bp, Homo sapiens
  misc_feature (61)..(62): /note="This region represents a CpG dinucleotide"
  misc_feature (61)..(61): /note="Nucleotide may be methylated to form 5-methylcytosine"
attagtcccatgaaacacaaatacacaagaccctgtaagcttgtcatgcaccactggcagcgccaaactccctgaagtcctagcggagagcccggctaaggaaaggtgctgcccaggtccgc

SEQ ID NO: 27764 - DNA, 122 bp, Homo sapiens
  misc_feature (61)..(62): /note="This region represents a CpG dinucleotide"
  misc_feature (61)..(61): /note="Nucleotide may be methylated to form 5-methylcytosine"
attgaccagatggcttttctcagatgaagcaaatgattggggcattctctttatgagactcggcaccattaccaatggagcttagatcagtgtgaggccctgttcattttttgcccatgtta

SEQ ID NO: 27765 - DNA, 122 bp, Homo sapiens
  misc_feature (61)..(62): /note="This region represents a CpG dinucleotide"
  misc_feature (61)..(61): /note="Nucleotide may be methylated to form 5-methylcytosine"
tcttggatgactcaacatgtctaataagcaccaggcacaatgcctagtacaagtacctgtcgcccaggagtacactggcgtgatcatggctcactgcagccttgacctcctgggcccaagca

SEQ ID NO: 27766 - DNA, 122 bp, Homo sapiens
  misc_feature (61)..(62): /note="This region represents a CpG dinucleotide"
  misc_feature (61)..(61): /note="Nucleotide may be methylated to form 5-methylcytosine"
catgccagagtccctgtgagaacgctggaccctcgattactaacatacgtttcaaaacctcggaggtattgaactagcagtgatggaagaacaagcaacagaagcaacaggatcccagctgc

SEQ ID NO: 27767 - DNA, 122 bp, Homo sapiens
  misc_feature (61)..(62): /note="This region represents a CpG dinucleotide"
  misc_feature (61)..(61): /note="Nucleotide may be methylated to form 5-methylcytosine"
acatgctcagagaagtgatgtaacctccttggggtcacacagccggcagtggccagggctcggggcagaaaggggaaaccaatgctcaggaaggggctaggggtgggaaggaagtcagagtc

SEQ ID NO: 27768 - DNA, 122 bp, Homo sapiens
  misc_feature (61)..(62): /note="This region represents a CpG dinucleotide"
  misc_feature (61)..(61): /note="Nucleotide may be methylated to form 5-methylcytosine"
gagattgcaggacaatggaatgataaaggtccaacacttaaccatcagtggcaagactaacgcaatcttcacaacagcagaaaaacctgaatggcaggcccatcagagggccatggagatgg

SEQ ID NO: 27769 - DNA, 122 bp, Homo sapiens
  misc_feature (61)..(62): /note="This region represents a CpG dinucleotide"
  misc_feature (61)..(61): /note="Nucleotide may be methylated to form 5-methylcytosine"
gaggaagtgagaaaagggcagtgttctggaagcccagggagagaggagtatgcattaaatcgtcaacttgttaaaacacccagggagacaaagcaaaagcagaagtgacaggaagccactgg

SEQ ID NO: 27770 - DNA, 122 bp, Homo sapiens
  misc_feature (61)..(62): /note="This region represents a CpG dinucleotide"
  misc_feature (61)..(61): /note="Nucleotide may be methylated to form 5-methylcytosine"
gatcccatggtgcctcagtttccttcttgtgaagcaggtacaataagagtttctacttcacggggatactgtcctgagctcacagaaggcaattgatcactgccactattattgcctcctaa

SEQ ID NO: 27771 - DNA, 122 bp, Homo sapiens
  misc_feature (61)..(62): /note="This region represents a CpG dinucleotide"
  misc_feature (61)..(61): /note="Nucleotide may be methylated to form 5-methylcytosine"
ctgggcttaagcgattctcttgccttagtcttgcatgtagctgggattacttgcatgagccgtgttgcccaggctggtctcaaactcctggctgttttttgtcttttaaaaacagctttatt

SEQ ID NO: 27772 - DNA, 122 bp, Homo sapiens
  misc_feature (61)..(62): /note="This region represents a CpG dinucleotide"
  misc_feature (61)..(61): /note="Nucleotide may be methylated to form 5-methylcytosine"
ttatctcatagttcccttcctggtctgtcagcattgcctcatagagagggaaatacatcccgcatctgcctcatcatgaacttgggtggccaccaggatattgctcatgaaagctgcttttc

SEQ ID NO: 27773 - DNA, 122 bp, Homo sapiens
  misc_feature (61)..(62): /note="This region represents a CpG dinucleotide"
  misc_feature (61)..(61): /note="Nucleotide may be methylated to form 5-methylcytosine"
taaaacagataaaaatgaagttttctagaaaaaactcatgaaagtggctgcaattacatccgtcatagaacctaaaacccatgtgacaaggtaggaagtgatggctcttacctggctcttct

SEQ ID NO: 27774 - DNA, 122 bp, Homo sapiens
  misc_feature (61)..(62): /note="This region represents a CpG dinucleotide"
  misc_feature (61)..(61): /note="Nucleotide may be methylated to form 5-methylcytosine"
gcaggacctcagatttccttatgcgcaaaatgtccccattttttgcagagtttcttggagcgtccttctaaggttgagctcagctcacttcactaggttgtcatttaagagcatattgtggg

SEQ ID NO: 27775 - DNA, 122 bp, Homo sapiens
  misc_feature (61)..(62): /note="This region represents a CpG dinucleotide"
  misc_feature (61)..(61): /note="Nucleotide may be methylated to form 5-methylcytosine"
tgtaataaacagaggtggaatgcatcacttggagatgtgaccattagatagaaaagttttcgtaactgattgagcagtgtgatgccacgtagcttccttgctgtatttcaaagagaacaaaa

SEQ ID NO: 27776 - DNA, 122 bp, Homo sapiens
  misc_feature (61)..(62): /note="This region represents a CpG dinucleotide"
  misc_feature (61)..(61): /note="Nucleotide may be methylated to form 5-methylcytosine"
tcagatttgggattaacaaacttccacttagacattctgcctgactgacctcaggcatttcgcactctgaatgtcaaacccaactcattgtcatctctgaagctgctcacttaattctcctc

SEQ ID NO: 27777 - DNA, 122 bp, Homo sapiens
  misc_feature (61)..(62): /note="This region represents a CpG dinucleotide"
  misc_feature (61)..(61): /note="Nucleotide may be methylated to form 5-methylcytosine"
agtgctttgcatacattttctcaattaatcctaactggaggcacggactattattatctccgcttttcaaaagtggaaacaccggcacagagagattaagcaacttgcccaaggtcacacag

SEQ ID NO: 27778 - DNA, 122 bp, Homo sapiens
  misc_feature (61)..(62): /note="This region represents a CpG dinucleotide"
  misc_feature (61)..(61): /note="Nucleotide may be methylated to form 5-methylcytosine"
gctcacatctcaaggcagtcagtctgggaaatggccttggtcccctgccctaccctggcacggttctcctgagtctccctttagctgggatgtgggactcccagtggctctcactccctcat

SEQ ID NO: 27779 - DNA, 122 bp, Homo sapiens
  misc_feature (61)..(62): /note="This region represents a CpG dinucleotide"
  misc_feature (61)..(61): /note="Nucleotide may be methylated to form 5-methylcytosine"
tggggggataacacataatccattgtgtaataacttcttaggtcaccaatcatgtaccagcgcaagctctgtgccaggccctgttaggtgcccacagcatgagacttaataagccaagagct

SEQ ID NO: 27780 - DNA, 122 bp, Homo sapiens
  misc_feature (61)..(62): /note="This region represents a CpG dinucleotide"
  misc_feature (61)..(61): /note="Nucleotide may be methylated to form 5-methylcytosine"
ggaaaccagcaggcaggtttgggcaggagggagctggctcaccacaaaggcaagggaaggcgaaggctaggtgtcttctgccagcatcgggggcccaatgggggctctttctgggggggtca

SEQ ID NO: 27781 - DNA, 122 bp, Homo sapiens
  misc_feature (61)..(62): /note="This region represents a CpG dinucleotide"
  misc_feature (61)..(61): /note="Nucleotide may be methylated to form 5-methylcytosine"
tgcaagaagctcttgattatcttcatggtggactggctcattttcattccgggctgacctcgttgatatgttctctaccacttctccttgctgagaagtagttggcgtctattcaaagtaca

SEQ ID NO: 27782 - DNA, 122 bp, Homo sapiens
  misc_feature (61)..(62): /note="This region represents a CpG dinucleotide"
  misc_feature (61)..(61): /note="Nucleotide may be methylated to form 5-methylcytosine"
ggtgaagagtaaatagatcaccaagtattttgaaagttaccttccttggccaggcacagtcgctcacgcctgtaatcccagcactttagaaagccaaggcgggaagatcacctgaacccagc

SEQ ID NO: 27783 - DNA, 122 bp, Homo sapiens
  misc_feature (61)..(62): /note="This region represents a CpG dinucleotide"
  misc_feature (61)..(61): /note="Nucleotide may be methylated to form 5-methylcytosine"
aagcaggttggggccaggtgcggtggctcatgcctttaatctcagcaactggggaggccacggtgagtgaatcatctgaggtcaggagttccagaccagcctgaccaacatgattaaaccct

SEQ ID NO: 27784 - DNA, 122 bp, Homo sapiens
  misc_feature (61)..(62): /note="This region represents a CpG dinucleotide"
  misc_feature (61)..(61): /note="Nucleotide may be methylated to form 5-methylcytosine"
gcttcttcccaaacaatagaaggtgtggggttttaaggaccaggtgcagggcgagagaagcgtgtttgcatgtgcagggcgggactccagatatgcctaattcataaatatatatgttcata

SEQ ID NO: 27785 - DNA, 122 bp, Homo sapiens
  misc_feature (61)..(62): /note="This region represents a CpG dinucleotide"
  misc_feature (61)..(61): /note="Nucleotide may be methylated to form 5-methylcytosine"
ctgttcatgagagtcacctcagctccacgaaaaccttgttcaacaaaggcacacagagctcgggccactggaggaagcagcaagcaccctgatgtcatgcttactccagggcaaaactctgt

SEQ ID NO: 27786 - DNA, 122 bp, Homo sapiens
  misc_feature (61)..(62): /note="This region represents a CpG dinucleotide"
  misc_feature (61)..(61): /note="Nucleotide may be methylated to form 5-methylcytosine"
gagtcttggctattattgatgattttgcattgtcatatacattttcaagccaaatccaatcggttagtccagttccactataaaccctgttgggattacattgattctatagagcagtactg

SEQ ID NO: 27787 - DNA, 122 bp, Homo sapiens
  misc_feature (61)..(62): /note="This region represents a CpG dinucleotide"
  misc_feature (61)..(61): /note="Nucleotide may be methylated to form 5-methylcytosine"
caggcccttccgacccccacctgcaccccctccctccctaggctggtcccgctccgcacccggaacgtgtccgccacgatctcagctcctcggtgattggtccatttggagaggcctacgaa

SEQ ID NO: 27788 - DNA, 122 bp, Homo sapiens
  misc_feature (61)..(62): /note="This region represents a CpG dinucleotide"
  misc_feature (61)..(61): /note="Nucleotide may be methylated to form 5-methylcytosine"
ctttaaggcttcttccagctctgacaacctgtgatagcagtaatttcacattgtctaacacgtacttgatttcttacccctttctcatgccagcttttctgggatcagctttacaattgctc

SEQ ID NO: 27789 - DNA, 122 bp, Homo sapiens
  misc_feature (61)..(62): /note="This region represents a CpG dinucleotide"
  misc_feature (61)..(61): /note="Nucleotide may be methylated to form 5-methylcytosine"
acctcaggtgatccacccacttcggcctcccagagtgctgggattacaggcgtgagccaccgcgcccggcccattaatactgttaattcgagcagaatgttcttggccccgccccaacagcc

SEQ ID NO: 27790 - DNA, 122 bp, Homo sapiens
  misc_feature (61)..(62): /note="This region represents a CpG dinucleotide"
  misc_feature (61)..(61): /note="Nucleotide may be methylated to form 5-methylcytosine"
agcactttggataaaaactcttaagacctggccatgcctaatgaagtactcttacttgaacggacagaaatctggaaggatcctcctgcttaaaaggttaggaatgataagcaagatgggaa

SEQ ID NO: 27791 - DNA, 122 bp, Homo sapiens
  misc_feature (61)..(62): /note="This region represents a CpG dinucleotide"
  misc_feature (61)..(61): /note="Nucleotide may be methylated to form 5-methylcytosine"
aacatgattcatcaaccagctgtctgccttaaaggcctgtaagcctgaggtcatgttttgcgtaaataaatgctgacatgccaaagtggcacaatggatttctttcctaagcactagagttg

SEQ ID NO: 27792 - DNA, 122 bp, Homo sapiens
  misc_feature (61)..(62): /note="This region represents a CpG dinucleotide"
  misc_feature (61)..(61): /note="Nucleotide may be methylated to form 5-methylcytosine"
tcttcggtttcttcaccttctcaggggtgtggcactcagagggcgagtcttcatcttcctcgtcaacagcagtggatggccggcgctgggaagaggtcatgtgcatgggtggcaggtgccat

SEQ ID NO: 27793 - DNA, 122 bp, Homo sapiens
  misc_feature (61)..(62): /note="This region represents a CpG dinucleotide"
  misc_feature (61)..(61): /note="Nucleotide may be methylated to form 5-methylcytosine"
tattgagctggtgctgataatgtggaatattcgcactgtgaaactccaccgagctgcatgcgtgtgactcatgtgctcctgtacccatgctattctttgatgataacatctttcataccttc

SEQ ID NO: 27794 - DNA, 122 bp, Homo sapiens
  misc_feature (61)..(62): /note="This region represents a CpG dinucleotide"
  misc_feature (61)..(61): /note="Nucleotide may be methylated to form 5-methylcytosine"
aaccccagaaactcaacagtgagattcagctcagcaatgtgggcggggaacccactgtcccgccttgggcagggagcagccccagccgcttcatctgcctgatgctgggttttatccgcttc

SEQ ID NO: 27795 - DNA, 122 bp, Homo sapiens
  misc_feature (61)..(62): /note="This region represents a CpG dinucleotide"
  misc_feature (61)..(61): /note="Nucleotide may be methylated to form 5-methylcytosine"
tttggtgtatagcatagcctttttgagcctttcttcagcttcatgatgtgaccagaaccacgtgagcattccaagagcagacacaccccatttacagataagagcaccctccttgccttgtt

SEQ ID NO: 27796 - DNA, 122 bp, Homo sapiens
  misc_feature (61)..(62): /note="This region represents a CpG dinucleotide"
  misc_feature (61)..(61): /note="Nucleotide may be methylated to form 5-methylcytosine"
gaagataacagcatccggaagccctgtgcccaggcccagtggtgcctgagcactgccttccgggaggtgcaggtggctgctgtcccacagtgacagcccccatgttgaaaacccaaggcctc

SEQ ID NO: 27797 - DNA, 122 bp, Homo sapiens
  misc_feature (61)..(62): /note="This region represents a CpG dinucleotide"
  misc_feature (61)..(61): /note="Nucleotide may be methylated to form 5-methylcytosine"
aaccagaagcaagaggcgggagcagagccttgcgcccactgtgccctgccacccccagagcggagcactggccaagcagccaagaacatctagatcccgaccaccatgggaaggtctcattc

SEQ ID NO: 27798 - DNA, 122 bp, Homo sapiens
  misc_feature (61)..(62): /note="This region represents a CpG dinucleotide"
  misc_feature (61)..(61): /note="Nucleotide may be methylated to form 5-methylcytosine"
agccaccccctaggcaagctccagttgaggctgcctcccatggttaagagaacatgcaaacggtgttcctgactgaggctggtgtccgggcagtgctaagtaactggtgcctttgaccacat

SEQ ID NO: 27799 - DNA, 122 bp, Homo sapiens
  misc_feature (61)..(62): /note="This region represents a CpG dinucleotide"
  misc_feature (61)..(61): /note="Nucleotide may be methylated to form 5-methylcytosine"
gatccctgaaaaggcccttaattcagctctatgagccattttcagagcagtttttcaatccgttctataataataatgatcatatatgacatatatatatattttgagatggagtctcactc

SEQ ID NO: 27800 - DNA, 122 bp, Homo sapiens
  misc_feature (61)..(62): /note="This region represents a CpG dinucleotide"
  misc_feature (61)..(61): /note="Nucleotide may be methylated to form 5-methylcytosine"
atcacgatgctacttcctgggatttatctggaccaagacgtgtgacaaatggaagtttcccgttttctgaaggaagtgttgtctgcaaaaataaaaatagtcaagagctttctcagagaatc

SEQ ID NO: 27801 - DNA, 122 bp, Homo sapiens
  misc_feature (61)..(62): /note="This region represents a CpG dinucleotide"
  misc_feature (61)..(61): /note="Nucleotide may be methylated to form 5-methylcytosine"
ttgcctaattttaagttacttaacttctctgtatctccattgcttcatctgtaaaacgggcgtaattacagaaccagcctcacaagggttgtgaaaatgtaatgagtaactacataaaaagc

SEQ ID NO: 27802 - DNA, 122 bp, Homo sapiens
  misc_feature (61)..(62): /note="This region represents a CpG dinucleotide"
  misc_feature (61)..(61): /note="Nucleotide may be methylated to form 5-methylcytosine"
cagagcaaaagatacgagaaccttaaaagcaggtggtcattgacttcaaggggacgagatcgccctccccactgcctctccccatacagacgctcacagaatagacggggaagcaactatga

SEQ ID NO: 27803 - DNA, 122 bp, Homo sapiens
  misc_feature (61)..(62): /note="This region represents a CpG dinucleotide"
  misc_feature (61)..(61): /note="Nucleotide may be methylated to form 5-methylcytosine"
gataaatgcaaacatgatcctcagggatcatatctgaagctgaatttgggattacaaccccgaggacctgggctcatggtgatgttgccaataacaatctcagctgagtagtgaggctgttc

SEQ ID NO: 27804 - DNA, 122 bp, Homo sapiens
  misc_feature (61)..(62): /note="This region represents a CpG dinucleotide"
  misc_feature (61)..(61): /note="Nucleotide may be methylated to form 5-methylcytosine"
aagccgtccatcaaggcggcgcgcgccaaaaagatcttcggctggggggacttctactttcgggtgcataccctcaagttttcgctgctggtgaccggcaagatcgtggaccatgtgaacgg

SEQ ID NO: 27805 - DNA, 122 bp, Homo sapiens
  misc_feature (61)..(62): /note="This region represents a CpG dinucleotide"
  misc_feature (61)..(61): /note="Nucleotide may be methylated to form 5-methylcytosine"
cttggtttttcagagcttcctaatttgacagaagcagcgtggtttccttccttgtcaagccgctatagcaccagcttcccaatcctacaggctgctagctagcttcctgattttggaggcag

SEQ ID NO: 27806 - DNA, 122 bp, Homo sapiens
  misc_feature (61)..(62): /note="This region represents a CpG dinucleotide"
  misc_feature (61)..(61): /note="Nucleotide may be methylated to form 5-methylcytosine"
ccgggcctggaccagtgtgtgacctattaggaaccaggatgcacagcaggaggtgagtggcgggtgagcaagaaaaggttcatttgtgtttacagctgctccccattgcttgcactaccatc

SEQ ID NO: 27807 - DNA, 122 bp, Homo sapiens
  misc_feature (61)..(62): /note="This region represents a CpG dinucleotide"
  misc_feature (61)..(61): /note="Nucleotide may be methylated to form 5-methylcytosine"
gaacagtgtggttcagagcacagggccctggagagcatgccctgaaggctgggctgtagccggttctattactggatacttggacaagtcacttgtccggtgtgaatcatttccttttctga

SEQ ID NO: 27808 - DNA, 122 bp, Homo sapiens
  misc_feature (61)..(62): /note="This region represents a CpG dinucleotide"
  misc_feature (61)..(61): /note="Nucleotide may be methylated to form 5-methylcytosine"
agaaaagagagcccggtcttgaggctgctgtaatgagggagacagttcccagtttgtccccgacctgcccttagctcagctctttcagggacctgttggtgtggcctgatggcatggccctg

SEQ ID NO: 27809 - DNA, 122 bp, Homo sapiens
  misc_feature (61)..(62): /note="This region represents a CpG dinucleotide"
  misc_feature (61)..(61): /note="Nucleotide may be methylated to form 5-methylcytosine"
ggggtggtttctgtacttaagtcactgcttccaataaatccctagtcaggttaactgtaacgggttaacctgttggaaggaaggaaatggaagaggcaaaggaaaaccctttccttccacgc

SEQ ID NO: 27810 - DNA, 122 bp, Homo sapiens
  misc_feature (61)..(62): /note="This region represents a CpG dinucleotide"
  misc_feature (61)..(61): /note="Nucleotide may be methylated to form 5-methylcytosine"
tagccctccccagcctgtgggcacagcaccagacacaaggagatgtgagaatggccacagcggcccacatttgggcttaagctctggggtcagactgcctaacttagaatccttattctgcc

SEQ ID NO: 27811 - DNA, 122 bp, Homo sapiens
  misc_feature (61)..(62): /note="This region represents a CpG dinucleotide"
  misc_feature (61)..(61): /note="Nucleotide may be methylated to form 5-methylcytosine"
attcttagcagacacatcttaacacacaaaaagcaacacgcaacaaaatagatcaagaaacgatgcaaagaaaagacatgctcaggtaagcacagtgcctactgtcctgggaaacacaacag

SEQ ID NO: 27812 - DNA, 122 bp, Homo sapiens
  misc_feature (61)..(62): /note="This region represents a CpG dinucleotide"
  misc_feature (61)..(61): /note="Nucleotide may be methylated to form 5-methylcytosine"
aggaagagcctaagaggtcagaggaaaacccagtaaaaaaaaatgtgccatggaaactaacgacagtgttgttctcagaagaaaacaatgagtaagtttgatatggatgaatggatgggtga

SEQ ID NO: 27813 - DNA, 122 bp, Homo sapiens
  misc_feature (61)..(62): /note="This region represents a CpG dinucleotide"
  misc_feature (61)..(61): /note="Nucleotide may be methylated to form 5-methylcytosine"
tgttgccctggctggagtgcagtgactattcacagatgctattacagtgcactataggcccggactcctgggttcggcagttctcccacctcagcctcccacacagttgggactccaggtgt

SEQ ID NO: 27814 - DNA, 122 bp, Homo sapiens
  misc_feature (61)..(62): /note="This region represents a CpG dinucleotide"
  misc_feature (61)..(61): /note="Nucleotide may be methylated to form 5-methylcytosine"
gaagaacatgccaggcaggcgaaggactgagcaggggtgtccacacgctgctgaatggagcggctagagccgggtgcctcgctgggagccggtgaggacggtgtgcaggctggaaatgtccc

SEQ ID NO: 27815 - DNA, 122 bp, Homo sapiens
  misc_feature (61)..(62): /note="This region represents a CpG dinucleotide"
  misc_feature (61)..(61): /note="Nucleotide may be methylated to form 5-methylcytosine"
ttgaaggcagagggctgctcagcatcttgtaacaagacaggccctgctctgaacccggaacgagagcgcgccagctgtccttgacatttccaaggcagttgtcatctttttagatgtaatct

SEQ ID NO: 27816 - DNA, 122 bp, Homo sapiens
  misc_feature (61)..(62): /note="This region represents a CpG dinucleotide"
  misc_feature (61)..(61): /note="Nucleotide may be methylated to form 5-methylcytosine"
gccccaacacacgtcctccaggtgccactggtggctacctggagaggtgcagtttatggacgtgtgttcctgatactaagatttggcattggccaggcatggtgactcacaccagagatccc

SEQ ID NO: 27817 - DNA, 122 bp, Homo sapiens
  misc_feature (61)..(62): /note="This region represents a CpG dinucleotide"
  misc_feature (61)..(61): /note="Nucleotide may be methylated to form 5-methylcytosine"
ccaaaggcaccccacatgacatgaagcagcaactaggatcaggcaaagtctgtcagctgccgctgtatgttcaggaatataaacattactttacacaggtcacattcctaaatgagtgtgtt

SEQ ID NO: 27818 - DNA, 122 bp, Homo sapiens
  misc_feature (61)..(62): /note="This region represents a CpG dinucleotide"
  misc_feature (61)..(61): /note="Nucleotide may be methylated to form 5-methylcytosine"
taaggcaatgggagggccagagagggtgcctctcactcccatagtctctgagcgtgataacggtagcgccagaccagcacacaggcttcatgattttcagcagcatgttcttcccatccatg

SEQ ID NO: 27819 - DNA, 122 bp, Homo sapiens
  misc_feature (61)..(62): /note="This region represents a CpG dinucleotide"
  misc_feature (61)..(61): /note="Nucleotide may be methylated to form 5-methylcytosine"
acaaggtaaatttggattggttaggaactgccttttgtagtccagagagagattcaatggcgccatcaacagattaaattaggtaatatggaagaccagggaggaagaaaaaaatacaggag

SEQ ID NO: 27820 - DNA, 122 bp, Homo sapiens
  misc_feature (61)..(62): /note="This region represents a CpG dinucleotide"
  misc_feature (61)..(61): /note="Nucleotide may be methylated to form 5-methylcytosine"
aatacaaaacaacagctgcacggacgggcctgccagagaaacaactgatctgctctgtcacgacctgtttcacggatcccagatctgctctggggacaccacagtcagctccactcccatca

SEQ ID NO: 27821 - DNA, 122 bp, Homo sapiens
  misc_feature (61)..(62): /note="This region represents a CpG dinucleotide"
  misc_feature (61)..(61): /note="Nucleotide may be methylated to form 5-methylcytosine"
ctcccaccattctgcctgccatatgcctgtccccttttcctccaaaccctattagggtaccggaagcagaacccctgggctgaggccctggccctgcccccggcccctgcccctgcccgccc

SEQ ID NO: 27822 - DNA, 122 bp, Homo sapiens
  misc_feature (61)..(62): /note="This region represents a CpG dinucleotide"
  misc_feature (61)..(61): /note="Nucleotide may be methylated to form 5-methylcytosine"
gagtcagaaatattttcctaaaaattatttcattgctgataaacttgacatcattcccctcgtctaaaccacacattatagcattaactatagggaaaccataactaatatcattattttgg

SEQ ID NO: 27823 - DNA, 122 bp, Homo sapiens
  misc_feature (61)..(62): /note="This region represents a CpG dinucleotide"
  misc_feature (61)..(61): /note="Nucleotide may be methylated to form 5-methylcytosine"
agtgctatagcttgaatgtttttgtcccgtcccaaattcatgtgttggaatcttagtcaccgacacaataatgttgggaggtggggcctaatgggtggtgtttaggtcttgagagctccagt

SEQ ID NO: 27824 - DNA, 122 bp, Homo sapiens
  misc_feature (61)..(62): /note="This region represents a CpG dinucleotide"
  misc_feature (61)..(61): /note="Nucleotide may be methylated to form 5-methylcytosine"
taggagaacaatttgggcatccataccgtttgatggagcaactttatccctaatttatagcgcaacgtgtgcaaaacaagcacatggatagaatagtcaatgtggcagcatctgtaagtcga

SEQ ID NO: 27825 - DNA, 122 bp, Homo sapiens
  misc_feature (61)..(62): /note="This region represents a CpG dinucleotide"
  misc_feature (61)..(61): /note="Nucleotide may be methylated to form 5-methylcytosine"
attagtcctttaccaggtttgccttaaaactgagtcactgtgtgcctggcctttactcagcgcttcctcccatgtcgtgactgttataatgcatcattacttcctcactatgattcatctag

SEQ ID NO: 27826 - DNA, 122 bp, Homo sapiens
  misc_feature (61)..(62): /note="This region represents a CpG dinucleotide"
  misc_feature (61)..(61): /note="Nucleotide may be methylated to form 5-methylcytosine"
tgcttcgaaaagcctggaaagagcaactcagttgtaacttggggaagttaacgatccgcccgagtgcagaggaaaaccagaaacgccttgccttcagctgaaccaccgtttgtgcgagctgg

SEQ ID NO: 27827 - DNA, 122 bp, Homo sapiens
  misc_feature (61)..(62): /note="This region represents a CpG dinucleotide"
  misc_feature (61)..(61): /note="Nucleotide may be methylated to form 5-methylcytosine"
agcacaggttctgcgctccccattcctctgattagaagttgctttctctactgaggctaacgtatgtcattctcagatttgaaagtcttttttttctcttattctcagactaagagccaaag

SEQ ID NO: 27828 - DNA, 122 bp, Homo sapiens
  misc_feature (61)..(62): /note="This region represents a CpG dinucleotide"
  misc_feature (61)..(61): /note="Nucleotide may be methylated to form 5-methylcytosine"
ctacatcgctgaactcctctaacagaaccacaagactgacaagcgaaaagctttgggacccgagggaaagaaatctatactatatttatcacataatttcctaaattctaatagattcccaa

SEQ ID NO: 27829 - DNA, 122 bp, Homo sapiens
  misc_feature (61)..(62): /note="This region represents a CpG dinucleotide"
  misc_feature (61)..(61): /note="Nucleotide may be methylated to form 5-methylcytosine"
acgctgcaggcaattgtaatactgtggtaagtatttgtgcatctaaacacagaaaaggtacggtaaagacactgtgtaaaagataagaaatgatacacctgtataggggacttaccatgaac

SEQ ID NO: 27830 - DNA, 122 bp, Homo sapiens
  misc_feature (61)..(62): /note="This region represents a CpG dinucleotide"
  misc_feature (61)..(61): /note="Nucleotide may be methylated to form 5-methylcytosine"
tgacctcgtgatctgcccgcctcagcctcccaaagtgctgggattacaggcatgagccaccgtgcctggccacatttctgtatatcttgcaagcagacacactgtctgtcttttatttgatc

SEQ ID NO: 27831 - DNA, 122 bp, Homo sapiens
  misc_feature (61)..(62): /note="This region represents a CpG dinucleotide"
  misc_feature (61)..(61): /note="Nucleotide may be methylated to form 5-methylcytosine"
atgttcattgcttccggttttgaggacaggatattgtagggaacttgatatgatcaataacgcttgtctgccttacacagaccttagccagggatcagcctaatcttgaagaatcattcaaa

SEQ ID NO: 27832 - DNA, 122 bp, Homo sapiens
  misc_feature (61)..(62): /note="This region represents a CpG dinucleotide"
  misc_feature (61)..(61): /note="Nucleotide may be methylated to form 5-methylcytosine"
ctcaagcaatccgccctcctcagcctcccaaagtgctgagattacaggcgtgagccaccacgcctggcctgtgcacacattacttttgcaattagacaaaatgttcagtggttgcctagatt

SEQ ID NO: 27833 - DNA, 122 bp, Homo sapiens
  misc_feature (61)..(62): /note="This region represents a CpG dinucleotide"
  misc_feature (61)..(61): /note="Nucleotide may be methylated to form 5-methylcytosine"
taagagagagaaggtcaggcccttgtgagccagaagggatttgagagatgatgaaagctacgtatgttacccataacctaaggacttctggcaaggtggcctacctgagctggagtcatgcc

SEQ ID NO: 27834 - DNA, 122 bp, Homo sapiens
  misc_feature (61)..(62): /note="This region represents a CpG dinucleotide"
  misc_feature (61)..(61): /note="Nucleotide may be methylated to form 5-methylcytosine"
gaaattcatacagggcacatgagaaacaaggaatgtttgggacactgtcacacaacagagcggcctggggagacatctgtgatgtgctaccccagacttgaccctggaacagaaaaaggatg

SEQ ID NO: 27835 - DNA, 122 bp, Homo sapiens
  misc_feature (61)..(62): /note="This region represents a CpG dinucleotide"
  misc_feature (61)..(61): /note="Nucleotide may be methylated to form 5-methylcytosine"
cttttagaaactcagaaaagggaataaaattcagggtagatgctgaacaatgagaggttacgattgttgagatgaaaatttagggatcaatgccaagtttggaagtaggaacacacaaaaca

SEQ ID NO: 27836 - DNA, 122 bp, Homo sapiens
  misc_feature (61)..(62): /note="This region represents a CpG dinucleotide"
  misc_feature (61)..(61): /note="Nucleotide may be methylated to form 5-methylcytosine"
ttcttccagaaaacacaaacatcaaggctaggacacacaggaagtagccatgagaaatatcgaggcccacaatggaaactttatgatttaaatgacctgagacatacaggaagtggcttatt

SEQ ID NO: 27837 - DNA, 122 bp, Homo sapiens
  misc_feature (61)..(62): /note="This region represents a CpG dinucleotide"
  misc_feature (61)..(61): /note="Nucleotide may be methylated to form 5-methylcytosine"
acattcactcatgctgctacactcagtaaacaaagtgagatcaaggctgaaatatctgaacgagctgtaagaaactatgcagattagagccaacaggttatttaagatcagagaggccacag

SEQ ID NO: 27838 - DNA, 122 bp, Homo sapiens
  misc_feature (61)..(62): /note="This region represents a CpG dinucleotide"
  misc_feature (61)..(61): /note="Nucleotide may be methylated to form 5-methylcytosine"
aggtctatttttaggtttcccatttctcaacagaaggctcccagttttgagttagcgcaacgcagactggactgtgccctagaaggaacaggaatgcttcctctttgtggcttcccctgcat

SEQ ID NO: 27839 - DNA, 122 bp, Homo sapiens
  misc_feature (61)..(62): /note="This region represents a CpG dinucleotide"
  misc_feature (61)..(61): /note="Nucleotide may be methylated to form 5-methylcytosine"
ccctgtgcctttcccatgttcaaatgtgttttccgttttggtttctaagacggcgactgccggtttccccaccgcatccacccccggtccggccagcaggaaccaggggaaggagagggcat

SEQ ID NO: 27840 - DNA, 122 bp, Homo sapiens
  misc_feature (61)..(62): /note="This region represents a CpG dinucleotide"
  misc_feature (61)..(61): /note="Nucleotide may be methylated to form 5-methylcytosine"
gacttgggttctagtggtgggtagagccaagaggaatgtgtgacgagtggcactttcaagcgggaggtagaaagcccagactggcacaagtcaaccatgctcacagcatgagctgctgactt

SEQ ID NO: 27841 - DNA, 122 bp, Homo sapiens
  misc_feature (61)..(62): /note="This region represents a CpG dinucleotide"
  misc_feature (61)..(61): /note="Nucleotide may be methylated to form 5-methylcytosine"
aatagtgctgcctcctgcttaaagccaatgatgtcaacactgagtcaatagcaccaaggccgctgcaactgccactccctaaagcttaaggtattcaccaaaggtaccaccatcccccattg

SEQ ID NO: 27842 - DNA, 122 bp, Homo sapiens
  misc_feature (61)..(62): /note="This region represents a CpG dinucleotide"
  misc_feature (61)..(61): /note="Nucleotide may be methylated to form 5-methylcytosine"
atgcctgtaatcccagctactcaggaggctgagccaggagaatcacttgaacccaggaggcggaggttacaatgagccgcaatcttgccacttcactccagcctgggcgatagagtgagact

SEQ ID NO: 27843 - DNA, 122 bp, Homo sapiens
  misc_feature (61)..(62): /note="This region represents a CpG dinucleotide"
  misc_feature (61)..(61): /note="Nucleotide may be methylated to form 5-methylcytosine"
agtcccccaaaagcccatccctagagaatttgtcactatttgacctgacagctcagggctcgtctgtttcatttgactcagaggttgttccatgcaaccagccctacccatagggcatttat

SEQ ID NO: 27844 - DNA, 122 bp, Homo sapiens
  misc_feature (61)..(62): /note="This region represents a CpG dinucleotide"
  misc_feature (61)..(61): /note="Nucleotide may be methylated to form 5-methylcytosine"
caacagcagctgttcctgcagctccaaatcctcagccagcagcagcagcagcagcaacaccgattcagctacctagggatgcaccaagctcagcttaagtaagtccggcaaggctgggaggg

SEQ ID NO: 27845 - DNA, 122 bp, Homo sapiens
  misc_feature (61)..(62): /note="This region represents a CpG dinucleotide"
  misc_feature (61)..(61): /note="Nucleotide may be methylated to form 5-methylcytosine"
tgactttgtgatctgcctgcctcggcctcccaaagtgctgggattacagtcgtgagccaccgcacccagccgcacctactcttttgtaaagcacctgtgacaatgaaggacagatttatcac

SEQ ID NO: 27846 - DNA, 122 bp, Homo sapiens
  misc_feature (61)..(62): /note="This region represents a CpG dinucleotide"
  misc_feature (61)..(61): /note="Nucleotide may be methylated to form 5-methylcytosine"
gacttggtactgaccctgagcaacccccagatgtcattggagggtacaggtgggtctcagcggggtgggatggggcacggagtgggagacagatccatctaagggcctgttagacaaatggg

SEQ ID NO: 27847 - DNA, 122 bp, Homo sapiens
  misc_feature (61)..(62): /note="This region represents a CpG dinucleotide"
  misc_feature (61)..(61): /note="Nucleotide may be methylated to form 5-methylcytosine"
tgccctgggaggagggctgatggctactggccttgctgatggtggcccccctggccagcacgccatctgacaggttccttgcagctaaaggtcttgctgggccacccaggtgtgactcactc

SEQ ID NO: 27848 - DNA, 122 bp, Homo sapiens
  misc_feature (61)..(62): /note="This region represents a CpG dinucleotide"
  misc_feature (61)..(61): /note="Nucleotide may be methylated to form 5-methylcytosine"
acagcctgcagagcctcgagccaaataaacctcttagcgtcaggtgttcctttatagcagcgcaacagactaagacagtgatgcaactggaagtgcaggagcattaaccagcttaaacccaa

SEQ ID NO: 27849 - DNA, 122 bp, Homo sapiens
  misc_feature (61)..(62): /note="This region represents a CpG dinucleotide"
  misc_feature (61)..(61): /note="Nucleotide may be methylated to form 5-methylcytosine"
aaggtgagagaagatagcattatcagtaaaggggaagagacatctgagcacacatatttacgaaaagcacatcagacttgggaactgccggatgtgctctctggggacctaactgggaacca

SEQ ID NO: 27850 - DNA, 122 bp, Homo sapiens
  misc_feature (61)..(62): /note="This region represents a CpG dinucleotide"
  misc_feature (61)..(61): /note="Nucleotide may be methylated to form 5-methylcytosine"
gaagagagatgggagaggtggcacacactttcaaagaaccagatctcctgagaattctgtcgcgagatagcactatggggattgtgctaaaccattagaaactgccccttgatctaatcacc

SEQ ID NO: 27851 - DNA, 122 bp, Homo sapiens
  misc_feature (61)..(62): /note="This region represents a CpG dinucleotide"
  misc_feature (61)..(61): /note="Nucleotide may be methylated to form 5-methylcytosine"
cctgaggtggttcaagtgcatgttcaagtctgggacataggctctagatcagataaggtccgagaaacagtggttctcaactctggttgtgcaccatcaacacacaccccaggtcatttata

SEQ ID NO: 27852 - DNA, 122 bp, Homo sapiens
  misc_feature (61)..(62): /note="This region represents a CpG dinucleotide"
  misc_feature (61)..(61): /note="Nucleotide may be methylated to form 5-methylcytosine"
aaactggagcaaaagcctctgtccacgtatcgtagctctccttttcttttcttacaggaacgctgcatcccgaggtgaattaacagtcatggatatagctgggtcctaagtccccacacagt

SEQ ID NO: 27853 - DNA, 122 bp, Homo sapiens
  misc_feature (61)..(62): /note="This region represents a CpG dinucleotide"
  misc_feature (61)..(61): /note="Nucleotide may be methylated to form 5-methylcytosine"
tatactggttgtactcacatggaaaacaggaaacatccttttgcagggaccacaccgtttcgaagaaaattgaaccactgcgagtttgtgtccggcagctgtcaaaaatgttttaaattcat

SEQ ID NO: 27854 - DNA, 122 bp, Homo sapiens
  misc_feature (61)..(62): /note="This region represents a CpG dinucleotide"
  misc_feature (61)..(61): /note="Nucleotide may be methylated to form 5-methylcytosine"
agtaaggctgagacctacagagctgcattctcaagtggtgaggcattcttagtcacaggacgcgatacaggtcaaaggccttgctggtgaaaggatgtggtaaagaagctggtcaaaaccca

SEQ ID NO: 27855 - DNA, 122 bp, Homo sapiens
  misc_feature (61)..(62): /note="This region represents a CpG dinucleotide"
  misc_feature (61)..(61): /note="Nucleotide may be methylated to form 5-methylcytosine"
gctaaccctcccgttcctcctttcacttcttgccattttcttacaaaactttggttgttccgcatgggtcttgagaggtggggccgttatagtagctgatagcagtgtcacttgggccacgt

SEQ ID NO: 27856 - DNA, 122 bp, Homo sapiens
  misc_feature (61)..(62): /note="This region represents a CpG dinucleotide"
  misc_feature (61)..(61): /note="Nucleotide may be methylated to form 5-methylcytosine"
taatctcttgtttcttaaagaggcacttttgtatacctgcctgattttcaaagctgtccccgattgttaggtaaactggacatgtgctgaggaatcgaatggggcacagtttaccaacttct

SEQ ID NO: 27857 - DNA, 122 bp, Homo sapiens
  misc_feature (61)..(62): /note="This region represents a CpG dinucleotide"
  misc_feature (61)..(61): /note="Nucleotide may be methylated to form 5-methylcytosine"
cagccccctgcaagtttcttcttccccgcagtggtgaatagcgtgttcctgcaggagtcacgccttcccatcagagcattgatcacagaccttacaggacctcctccagatttccaagttcc

SEQ ID NO: 27858 - DNA, 122 bp, Homo sapiens
  misc_feature (61)..(62): /note="This region represents a CpG dinucleotide"
  misc_feature (61)..(61): /note="Nucleotide may be methylated to form 5-methylcytosine"
ggaatccattcttttaagccagggtttaaaactcttcaagcaagtcatctgcaaaggtaccgcttctaccattttaaagataggattatgttccctaggacaactggatgagccctaggaac

SEQ ID NO: 27859 - DNA, 122 bp, Homo sapiens
  misc_feature (61)..(62): /note="This region represents a CpG dinucleotide"
  misc_feature (61)..(61): /note="Nucleotide may be methylated to form 5-methylcytosine"
tgcagtctaatcgagtattcttcctggtggggaaaaaaaagtaaatccactatcctggaacgagttcaaacatagcttgacaggctccaggagaatttacactgagcatgcttagccccgca

SEQ ID NO: 27860 - DNA, 122 bp, Homo sapiens
  misc_feature (61)..(62): /note="This region represents a CpG dinucleotide"
  misc_feature (61)..(61): /note="Nucleotide may be methylated to form 5-methylcytosine"
cagccaccagtgcctttggcaaggaattgcctgcaggtggcggatcaggtgacgcatcatcgcggcactcttgtgggctcctgagacagccatgtaaagagagcctaaggataacatgccag

SEQ ID NO: 27861 - DNA, 122 bp, Homo sapiens
  misc_feature (61)..(62): /note="This region represents a CpG dinucleotide"
  misc_feature (61)..(61): /note="Nucleotide may be methylated to form 5-methylcytosine"
cggtcaatactcaagttctctttctctacagagccacactgccttccaggctgcagcctgcgaggccaacacttctggggcatccccattgcactcggcacagtgcaggaacacatgatgtg

SEQ ID NO: 27862 - DNA, 122 bp, Homo sapiens
  misc_feature (61)..(62): /note="This region represents a CpG dinucleotide"
  misc_feature (61)..(61): /note="Nucleotide may be methylated to form 5-methylcytosine"
ccatcactgaaagcactgctcatgaatagtccatttcctcttccagaattggccaaatcacgccattgttgacagcccagctaggcagcgcctgatgacatttttggccctggaaatgacag

SEQ ID NO: 27863 - DNA, 122 bp, Homo sapiens
  misc_feature (61)..(62): /note="This region represents a CpG dinucleotide"
  misc_feature (61)..(61): /note="Nucleotide may be methylated to form 5-methylcytosine"
agagtccatccctgaatgctgcagccaagtctgcgcctccgcgtccactcacggggccaccgagcagtgatttggagacctgtttcaactatcagcgggggccaagggatccctgagccaga

SEQ ID NO: 27864 - DNA, 122 bp, Homo sapiens
  misc_feature (61)..(62): /note="This region represents a CpG dinucleotide"
  misc_feature (61)..(61): /note="Nucleotide may be methylated to form 5-methylcytosine"
aggcactgacccagaaggctgccacagaaacactgactcatgggccctgttcctgtgtctcgggctcagggataaatttggttacagataccaagcctctagaaaaacaaaagacaaaggta

SEQ ID NO: 27865 - DNA, 122 bp, Homo sapiens
  misc_feature (61)..(62): /note="This region represents a CpG dinucleotide"
  misc_feature (61)..(61): /note="Nucleotide may be methylated to form 5-methylcytosine"
tccctggaggagagtggtgacaaaataaggggtgtgcccacgtgtgatgtgctgaggaggcggacggcagcttgcagatgagcaggtttattccataagaacttaatctcattctgttttct

SEQ ID NO: 27866 - DNA, 122 bp, Homo sapiens
  misc_feature (61)..(62): /note="This region represents a CpG dinucleotide"
  misc_feature (61)..(61): /note="Nucleotide may be methylated to form 5-methylcytosine"
ttgctgactggaagaaatatccatgacatgttgtgatgtgtgtgcagctgcagacctctacgtagagtaagtacgttattgtttgtggaaaaaagtatgtgtgtgttcacaggtatgtacat

SEQ ID NO: 27867 - DNA, 122 bp, Homo sapiens
  misc_feature (61)..(62): /note="This region represents a CpG dinucleotide"
  misc_feature (61)..(61): /note="Nucleotide may be methylated to form 5-methylcytosine"
caccaaagaaaaaaaaaacccaaatatcataagttcacttttgatagtcatgataacaaccgtaccactgtacagttgtttttatcttttctcatctcattttatcctctcagctctgggat

SEQ ID NO: 27868 - DNA, 122 bp, Homo sapiens
  misc_feature (61)..(62): /note="This region represents a CpG dinucleotide"
  misc_feature (61)..(61): /note="Nucleotide may be methylated to form 5-methylcytosine"
aaagaaagcctgggcagtggcctcagtgaaccctcgaggatgctgtgatcctcttggtgacgtccccagcctctgcttcaggatgacagcatggtctcctgcaccatagctcggtctgaaat

SEQ ID NO: 27869 - DNA, 122 bp, Homo sapiens
  misc_feature (61)..(62): /note="This region represents a CpG dinucleotide"
  misc_feature (61)..(61): /note="Nucleotide may be methylated to form 5-methylcytosine"
tttgggaagactactctaaaaagctacttaattgcagtatattctgtgaatgaaagttcacggagctgaaaaatggaagtatttatgttagcatctgatcactaaggaaatgtggggcatac

SEQ ID NO: 27870 - DNA, 122 bp, Homo sapiens
  misc_feature (61)..(62): /note="This region represents a CpG dinucleotide"
  misc_feature (61)..(61): /note="Nucleotide may be methylated to form 5-methylcytosine"
cacatcccctcctctgtatggccttccccaagcacaggcccctccctaaagtgtgtgcggcgttatcagattggtgtgaatgttaatctctttaaaggaagcaggaatttatctgtactcca

SEQ ID NO: 27871 - DNA, 122 bp, Homo sapiens
  misc_feature (61)..(62): /note="This region represents a CpG dinucleotide"
  misc_feature (61)..(61): /note="Nucleotide may be methylated to form 5-methylcytosine"
gggtagtgtttatttttcagtcattcattacattaacagattagtcacctactacatgcccgttagtgtgcttgtcccttgtgagagattagtgagtggtaactagagatataattcccgct

SEQ ID NO: 27872 - DNA, 122 bp, Homo sapiens
  misc_feature (61)..(62): /note="This region represents a CpG dinucleotide"
  misc_feature (61)..(61): /note="Nucleotide may be methylated to form 5-methylcytosine"
gcatcaaactgtccccaagctcaaggccagaggaagagcaggttgggagagggcggggtgcggacaagcatttgctaagagggagaggcagttaccagcttattttgttcatggtctgtgtc

SEQ ID NO: 27873 - DNA, 122 bp, Homo sapiens
  misc_feature (61)..(62): /note="This region represents a CpG dinucleotide"
  misc_feature (61)..(61): /note="Nucleotide may be methylated to form 5-methylcytosine"
gctcagtttgcttccctggttgagtttcctatgaaattttcatggaccatcagagaatagcggcaaacaggaaatacacagtggaggaaatagcatggtgtggttttaggtgtacaactgac

SEQ ID NO: 27874 - DNA, 122 bp, Homo sapiens
  misc_feature (61)..(62): /note="This region represents a CpG dinucleotide"
  misc_feature (61)..(61): /note="Nucleotide may be methylated to form 5-methylcytosine"
gaaccaccacacccagccctataataaaatatttaatcagccatcagctgattgctgttccgtgtgtggcctggcagtatgtgttgagcatttgagaaaaggtgatggcccggggtgaatgg

SEQ ID NO: 27875 - DNA, 122 bp, Homo sapiens
  misc_feature (61)..(62): /note="This region represents a CpG dinucleotide"
  misc_feature (61)..(61): /note="Nucleotide may be methylated to form 5-methylcytosine"
ggtgacttaccttacctgagcttcagacttctcatctgtaaaatctagcctggcacatagcgaacattccaaaaaatgtacctactgattttatcgcagaaatcagcatctcttcccagcct

SEQ ID NO: 27876 - DNA, 122 bp, Homo sapiens
  misc_feature (61)..(62): /note="This region represents a CpG dinucleotide"
  misc_feature (61)..(61): /note="Nucleotide may be methylated to form 5-methylcytosine"
agaggccaggctctgcgtgcaggacttgagtgagcaagctaaggattcagttcagtagtacgctgtcagtctgtggcctgagcttcaaagtgtgatccctgcaacctgagggctaccagaac

SEQ ID NO: 27877 - DNA, 122 bp, Homo sapiens
  misc_feature (61)..(62): /note="This region represents a CpG dinucleotide"
  misc_feature (61)..(61): /note="Nucleotide may be methylated to form 5-methylcytosine"
atacatttttgacttatgatattttcaatgtatgatgggtttatcaggatgtaactgcatcgtgagttaaggtgcagttgtattctaagacctctacaaaaaacattgacagcctattgctg

SEQ ID NO: 27878 - DNA, 122 bp, Homo sapiens
  misc_feature (61)..(62): /note="This region represents a CpG dinucleotide"
  misc_feature (61)..(61): /note="Nucleotide may be methylated to form 5-methylcytosine"
atatgcaaccatctttgctattgtaaactcttcaaaaccctttttcattaattcacaccacgtatgtcagccttttgtattactaatcctagcatatgattatagattagtcagtctacttt

SEQ ID NO: 27879 - DNA, 122 bp, Homo sapiens
  misc_feature (61)..(62): /note="This region represents a CpG dinucleotide"
  misc_feature (61)..(61): /note="Nucleotide may be methylated to form 5-methylcytosine"
gagtgggaggtgtggtcactggtccaccaggaagacagctaagggcattcgttgagtccacgtgatgactttctgctctgagtgaggcccctggatggctgggaggaaggaagcagctctgc

SEQ ID NO: 27880 - DNA, 122 bp, Homo sapiens
  misc_feature (61)..(62): /note="This region represents a CpG dinucleotide"
  misc_feature (61)..(61): /note="Nucleotide may be methylated to form 5-methylcytosine"
taaatgccataaatgtaataaagttacatgtatttggcatcatacttcctagtccacccccggtattctagagctctctcagtacattttgaaacaccttcgtggaattttgaaatgcgttg

SEQ ID NO: 27881 - DNA, 122 bp, Homo sapiens
  misc_feature (61)..(62): /note="This region represents a CpG dinucleotide"
  misc_feature (61)..(61): /note="Nucleotide may be methylated to form 5-methylcytosine"
cttgttaacataagagcttttctttataaactatataaaattaaataacccccagaattgcgtttaaaagttaccactgttattcattgttctggaagagttggccaatttagttaagaata

SEQ ID NO: 27882 - DNA, 122 bp, Homo sapiens
  misc_feature (61)..(62): /note="This region represents a CpG dinucleotide"
  misc_feature (61)..(61): /note="Nucleotide may be methylated to form 5-methylcytosine"
ttggggcctctctgctccatcattctggggattctagtaacctcttgtctgtatcagttccgttgtttgtcatctcctacatcttcctctttgcttcttcctctttcttggtttactccctc

SEQ ID NO: 27883 - DNA, 122 bp, Homo sapiens
  misc_feature (61)..(62): /note="This region represents a CpG dinucleotide"
  misc_feature (61)..(61): /note="Nucleotide may be methylated to form 5-methylcytosine"
tatgtatgattttttatacaaagcataaagatgatttgtaccaaactcaggacactgtggcgagcttaacacgagggtattgaatcatacgtaagtggtaattcctagattatgcaatctcc

SEQ ID NO: 27884 - DNA, 122 bp, Homo sapiens
  misc_feature (61)..(62): /note="This region represents a CpG dinucleotide"
  misc_feature (61)..(61): /note="Nucleotide may be methylated to form 5-methylcytosine"
gtggcctgggtgggcttgcttgagctggactctgaggagcactggcggcagctctcatgtcgtctctgaaaggctgagctagccctgtctggcagaggccttcacttcacagcactctgttc

SEQ ID NO: 27885 - DNA, 122 bp, Homo sapiens
  misc_feature (61)..(62): /note="This region represents a CpG dinucleotide"
  misc_feature (61)..(61): /note="Nucleotide may be methylated to form 5-methylcytosine"
ggatagcctggggtaagttctcagctttgcttgcccactgccaggaaacaaacttggtgccgttagcaggcacacggtggaagtgagactggcccttcagattgtgtgggagctgggtgagg

SEQ ID NO: 27886 - DNA, 122 bp, Homo sapiens
  misc_feature (61)..(62): /note="This region represents a CpG dinucleotide"
  misc_feature (61)..(61): /note="Nucleotide may be methylated to form 5-methylcytosine"
ttagtgtgcttttagacatactataaaggcttcttttcgattacagaaatgaagaaggaacgaattgaggcactccaatttcagctaaagtagaaagtgtgggtaaactgtcagcttactgt

SEQ ID NO: 27887 - DNA, 122 bp, Homo sapiens
  misc_feature (61)..(62): /note="This region represents a CpG dinucleotide"
  misc_feature (61)..(61): /note="Nucleotide may be methylated to form 5-methylcytosine"
atgagatctccaaagatggagcagcagaaaaccactgtctgaatcttgcttgtgcacacgcgtcagggggtggaaggaggaagtggacacagcagatgtggcgtactggcttgcgtggtcgt

SEQ ID NO: 27888 - DNA, 122 bp, Homo sapiens
  misc_feature (61)..(62): /note="This region represents a CpG dinucleotide"
  misc_feature (61)..(61): /note="Nucleotide may be methylated to form 5-methylcytosine"
ttaagggagaactcagaaagatgaaaagccttgcccaaaatcacgagtctcagaccctcacggtgccaaagccaagattcaagcccaggaacagcagatcctgactcgattcttcctccacg

SEQ ID NO: 27889 - DNA, 122 bp, Homo sapiens
  misc_feature (61)..(62): /note="This region represents a CpG dinucleotide"
  misc_feature (61)..(61): /note="Nucleotide may be methylated to form 5-methylcytosine"
tctcgcggttgtggagaagcagcccatgctacacagaagaactgcagttgctaaactggccgcatacttcctctgctaggaacgaggaaggcacagggcttgcagaagggcaggttcctgtt

SEQ ID NO: 27890 - DNA, 122 bp, Homo sapiens
  misc_feature (61)..(62): /note="This region represents a CpG dinucleotide"
  misc_feature (61)..(61): /note="Nucleotide may be methylated to form 5-methylcytosine"
cttgcttggtgcaaggttctcacaaagcttcaatttgcaaagaccgtgatatctgccaaacgcaatacaatgaagtgtggctagtttgttacaacagccttaggaatcaaatccaaggtgat

SEQ ID NO: 27891 - DNA, 122 bp, Homo sapiens
  misc_feature (61)..(62): /note="This region represents a CpG dinucleotide"
  misc_feature (61)..(61): /note="Nucleotide may be methylated to form 5-methylcytosine"
accacccaccagaagagcatccaaagataataatctatgagaaaggagaccacaaaaatgcggatactgaatttctggcaggaccttggagcttatgtttaaagaagtgattgtcccttaga

SEQ ID NO: 27892 - DNA, 122 bp, Homo sapiens
  misc_feature (61)..(62): /note="This region represents a CpG dinucleotide"
  misc_feature (61)..(61): /note="Nucleotide may be methylated to form 5-methylcytosine"
tccatcattatgactagaagttgaaatgtatttaacagccctacatgataagatcagatacgcctgtttagtgagagcctgttttatgacaaccctttgcaaacagttagcctcaagatgga

SEQ ID NO: 27893 - DNA, 122 bp, Homo sapiens
  misc_feature (61)..(62): /note="This region represents a CpG dinucleotide"
  misc_feature (61)..(61): /note="Nucleotide may be methylated to form 5-methylcytosine"
atctctgcccagtcttcttgttgactcaagcagttttggggggagtagactccgcccctccgctgcctttcatcttcaacccggccttactcctaccaatcaggagccatgcacccaggctc

SEQ ID NO: 27894 - DNA, 122 bp, Homo sapiens
  misc_feature (61)..(62): /note="This region represents a CpG dinucleotide"
  misc_feature (61)..(61): /note="Nucleotide may be methylated to form 5-methylcytosine"
aagaggctgttgtgttgggtcaggtaagagactggttttgggacttggcggacagatgagcgagaaagatgacacctgcgtttctgaattaggtgattatacaggctgtcaatcaaggtagg

SEQ ID NO: 27895 - DNA, 122 bp, Homo sapiens
  misc_feature (61)..(62): /note="This region represents a CpG dinucleotide"
  misc_feature (61)..(61): /note="Nucleotide may be methylated to form 5-methylcytosine"
agcaggacctgagctgcggctatgactctggcaaaaggagtctggtcttgccggaacgggcgggggttgggggtgtgggccggggagatgccacagggtcattttcaggaactgaagggcgc

SEQ ID NO: 27896 - DNA, 122 bp, Homo sapiens
  misc_feature (61)..(62): /note="This region represents a CpG dinucleotide"
  misc_feature (61)..(61): /note="Nucleotide may be methylated to form 5-methylcytosine"
aggtgatccacccgtcttggcctcccaaagtgctgggattacaggcatgagccactgcgccggaccagagttgggtttagattacagaatgaggaattcagattagatttaagaggggttgg

SEQ ID NO: 27897 - DNA, 122 bp, Homo sapiens
  misc_feature (61)..(62): /note="This region represents a CpG dinucleotide"
  misc_feature (61)..(61): /note="Nucleotide may be methylated to form 5-methylcytosine"
atacgtgctcagatccaaactggaggtggaaagggcatatggggagggtgttaagtagaacggcctttggcgaggaaggcatcatagtgatctaattaaaagactagcatccacctgggtat

SEQ ID NO: 27898 - DNA, 122 bp, Homo sapiens
  misc_feature (61)..(62): /note="This region represents a CpG dinucleotide"
  misc_feature (61)..(61): /note="Nucleotide may be methylated to form 5-methylcytosine"
tcgatacaatctgagacgtgttccatagtgcgaagggccctgcggaatcacccaggaccccgtttcaggaagcgctgagccgccaaatgcgaggcacacacggggcacgggaggagccggga

SEQ ID NO: 27899 - DNA, 122 bp, Homo sapiens
  misc_feature (61)..(62): /note="This region represents a CpG dinucleotide"
  misc_feature (61)..(61): /note="Nucleotide may be methylated to form 5-methylcytosine"
aatataagcggacggggaaccgatttttaaccagatcaagttttcaaatatagattaacacgttttaattgtcctataaactattattcttaaagtcactcttaacaaaacccagacttgga

SEQ ID NO: 27900 - DNA, 122 bp, Homo sapiens
  misc_feature (61)..(62): /note="This region represents a CpG dinucleotide"
  misc_feature (61)..(61): /note="Nucleotide may be methylated to form 5-methylcytosine"
tccaagtgagtttctgagtcagcctgtgcgagggaggctcttggggctgggtgtgtgtgccgcctctgtgtgagcatgtgctagtcacacagctgggatatggccgtgttttggttccagct

SEQ ID NO: 27901 - DNA, 122 bp, Homo sapiens
  misc_feature (61)..(62): /note="This region represents a CpG dinucleotide"
  misc_feature (61)..(61): /note="Nucleotide may be methylated to form 5-methylcytosine"
ggggaggacacgaagacatacatcacctggctcctcagtggccttgctctgctgcttgagcgcctcacttgttatacagccaacacctgctagctgagtgggggttctctgtgataacagct

SEQ ID NO: 27902 - DNA, 122 bp, Homo sapiens
  misc_feature (61)..(62): /note="This region represents a CpG dinucleotide"
  misc_feature (61)..(61): /note="Nucleotide may be methylated to form 5-methylcytosine"
ccagggcagcggtgttggcccctcagttagggcagtctctggagctcgggaatgtcattgcgttcccatgcccagcagtgcagctggaactctgggtgctggctctgggcagtctttgctgt

SEQ ID NO: 27903 - DNA, 122 bp, Homo sapiens
  misc_feature (61)..(62): /note="This region represents a CpG dinucleotide"
  misc_feature (61)..(61): /note="Nucleotide may be methylated to form 5-methylcytosine"
aaggcctgaggcaaaaccgtcaaccccatacagcagagtcagacctgatctgatgccagacgccaaatcccaaatgtattgttttaaggcatatttaatatgagctcagatttcacagatat

SEQ ID NO: 27904 - DNA, 122 bp, Homo sapiens
  misc_feature (61)..(62): /note="This region represents a CpG dinucleotide"
  misc_feature (61)..(61): /note="Nucleotide may be methylated to form 5-methylcytosine"
aagagatagctggggaagaacaaacatatttggcattagtaatcctgaccaaggagccctcgccattacagcaaggaagttccaagagatttattaaaagcttacgcaaaggaaggcagctt

SEQ ID NO: 27905 - DNA, 122 bp, Homo sapiens
  misc_feature (61)..(62): /note="This region represents a CpG dinucleotide"
  misc_feature (61)..(61): /note="Nucleotide may be methylated to form 5-methylcytosine"
gagttcatcacaccataaaccacagggactttgtaggcatgttattgtattagcaccatacggagactactcatggaactcacatgcagagtgtgtgatgtcagagaagttgacacgaatcc

SEQ ID NO: 27906 - DNA, 122 bp, Homo sapiens
  misc_feature (61)..(62): /note="This region represents a CpG dinucleotide"
  misc_feature (61)..(61): /note="Nucleotide may be methylated to form 5-methylcytosine"
ctggctcagctgtggattccccaggctgtgtgtgaggcattgattgggtgtccctgttcccgggacagggattcaaaggagtttatagggctcagggtcttccatgatcaggtcaaagcata

SEQ ID NO: 27907 - DNA, 122 bp, Homo sapiens
  misc_feature (61)..(62): /note="This region represents a CpG dinucleotide"
  misc_feature (61)..(61): /note="Nucleotide may be methylated to form 5-methylcytosine"
cacaggcatggatccctcatgcatggcttagcaccatcaccttggtgatgagtgtgttctcgctctggtagttcatgagagacctagttgtttaaaacagcttggcacgtctccccatctct

SEQ ID NO: 27908 - DNA, 122 bp, Homo sapiens
  misc_feature (61)..(62): /note="This region represents a CpG dinucleotide"
  misc_feature (61)..(61): /note="Nucleotide may be methylated to form 5-methylcytosine"
cattgcttattataataattgtgacatttttatagccctacattgtctttctcaaagtaacggattcaggaggagtccttttctgagtagagtccacagaagaggtattctattggtaagca

SEQ ID NO: 27909 - DNA, 122 bp, Homo sapiens
  misc_feature (61)..(62): /note="This region represents a CpG dinucleotide"
  misc_feature (61)..(61): /note="Nucleotide may be methylated to form 5-methylcytosine"
gatagggcgctcagtatccctcattgaggaaaacatgaaactcacatctctccttattcacgggaaacccggaagcctctcagtcactcctgtaagaagtgggtctccaagtaacggaaaga

SEQ ID NO: 27910 - DNA, 122 bp, Homo sapiens
  misc_feature (61)..(62): /note="This region represents a CpG dinucleotide"
  misc_feature (61)..(61): /note="Nucleotide may be methylated to form 5-methylcytosine"
ttttgtctcctgcttgtggaatatcttcagttcctggaacctgaggttgtgtcttgcccccgtagcctccattgaatctggcccagtttggtatgatctcctagccacagcctctttgtctc

SEQ ID NO: 27911 - DNA, 122 bp, Homo sapiens
  misc_feature (61)..(62): /note="This region represents a CpG dinucleotide"
  misc_feature (61)..(61): /note="Nucleotide may be methylated to form 5-methylcytosine"
caccatgaatctacaaggtaggtgactattctctctactctgcaggtgaggaaaccggggcgtggagaggctgtgttacttgctcaaggtcacattactagcaagttccagatcaagatgca

SEQ ID NO: 27912 - DNA, 122 bp, Homo sapiens
  misc_feature (61)..(62): /note="This region represents a CpG dinucleotide"
  misc_feature (61)..(61): /note="Nucleotide may be methylated to form 5-methylcytosine"
aacataactccaaaggctggatgtaatcagaccaacagcattcagcgtcaatcaaaatgacggccaagaaacaggtgatttaataggtagccggtttttgaaactttctgacagtaaagcca

SEQ ID NO: 27913 - DNA, 122 bp, Homo sapiens
  misc_feature (61)..(62): /note="This region represents a CpG dinucleotide"
  misc_feature (61)..(61): /note="Nucleotide may be methylated to form 5-methylcytosine"
ggggaagggagtggttctcagtctattttttctgctccaacacatggtggggagcgtgaccgtcattcattcctcatgtatttattgcgtactcactacatactaagtactccttttgtttg

SEQ ID NO: 27914 - DNA, 122 bp, Homo sapiens
  misc_feature (61)..(62): /note="This region represents a CpG dinucleotide"
  misc_feature (61)..(61): /note="Nucleotide may be methylated to form 5-methylcytosine"
atggattaatcaagggccaccagttgcattactgattactaactttgcagaaatgaaacacggtatgttgggtcaaggttcagtgaggctggttttcataacattccaggcaataaacaggc

SEQ ID NO: 27915 - DNA, 122 bp, Homo sapiens
  misc_feature (61)..(62): /note="This region represents a CpG dinucleotide"
  misc_feature (61)..(61): /note="Nucleotide may be methylated to form 5-methylcytosine"
ctggacagttgcgaagtaaacatttacttttcaaagatgatgatcaaggaaacatctctacgaagggacccggatttaaggggagagctagctttcctggcaaggggctgtgattttgttct

SEQ ID NO: 27916 - DNA, 122 bp, Homo sapiens
  misc_feature (61)..(62): /note="This region represents a CpG dinucleotide"
  misc_feature (61)..(61): /note="Nucleotide may be methylated to form 5-methylcytosine"
atgagcccaaattatttcatggtcaccttttatacacgttactctctgaggtgccaaaaacgttctggctaaatgctctgccaaggtgtcatctggggaatcctaaccagacactagaggct

SEQ ID NO: 27917 - DNA, 122 bp, Homo sapiens
  misc_feature (61)..(62): /note="This region represents a CpG dinucleotide"
  misc_feature (61)..(61): /note="Nucleotide may be methylated to form 5-methylcytosine"
tcagagtttgggatgtcatcagtcacccatgggaacagtgaacgatgagtcagagacttccgtggagaaagtgctcttctgggagggagttcactgctatgtccgcttgcatataatagggg

SEQ ID NO: 27918 - DNA, 122 bp, Homo sapiens
  misc_feature (61)..(62): /note="This region represents a CpG dinucleotide"
  misc_feature (61)..(61): /note="Nucleotide may be methylated to form 5-methylcytosine"
tgctccaagctccgctgtcctcactccacaaggtccggggcggtggccaggatccacacccgcagagcatatttgctgcctgagttgcccaatcttctcagcggccagtccccacactgctc

SEQ ID NO: 27919 - DNA, 122 bp, Homo sapiens
  misc_feature (61)..(62): /note="This region represents a CpG dinucleotide"
  misc_feature (61)..(61): /note="Nucleotide may be methylated to form 5-methylcytosine"
aataaaagtggtgagtcagaagtcctaagcatcttccaaataagccaggctgaagggacacgtccttcaagcaagctgccaagtgctttgggaaaaatctccttcattctactacggttttg

SEQ ID NO: 27920 - DNA, 122 bp, Homo sapiens
  misc_feature (61)..(62): /note="This region represents a CpG dinucleotide"
  misc_feature (61)..(61): /note="Nucleotide may be methylated to form 5-methylcytosine"
ctttccttcagtttccagtaacttgttcctcatttctgtataaatcctcaccagaatagccgggcatggtggctcacacctgtaatcccagcactttgggaggctgaggtgggcggattgcc

SEQ ID NO: 27921 - DNA, 122 bp, Homo sapiens
  misc_feature (61)..(62): /note="This region represents a CpG dinucleotide"
  misc_feature (61)..(61): /note="Nucleotide may be methylated to form 5-methylcytosine"
aggatttgatgcgtggggaaaactggcttctccccatgcgtaggacactataggggcccacgcgtgtcttccccgcagcccagcaagaaagggggcgccgggggtgccctggcggataacag

SEQ ID NO: 27922 - DNA, 122 bp, Homo sapiens
  misc_feature (61)..(62): /note="This region represents a CpG dinucleotide"
  misc_feature (61)..(61): /note="Nucleotide may be methylated to form 5-methylcytosine"
atccacccgcctcggcctcccaaagtgctgggattacaggcatgagccactgcgcccggccgtagtcaacagtttagagtcaacagccccagctgtcactcacaagtgtcattctgggtgtg

SEQ ID NO: 27923 - DNA, 122 bp, Homo sapiens
  misc_feature (61)..(62): /note="This region represents a CpG dinucleotide"
  misc_feature (61)..(61): /note="Nucleotide may be methylated to form 5-methylcytosine"
ttgagtcttggtttccttgcctgtgaaatgggaagaatgactcatttcctgactaccttgcgtggttgggcaaatatcatttaggataattggtctgaaatgactctatggacttccaagcc

SEQ ID NO: 27924 - DNA, 122 bp, Homo sapiens
  misc_feature (61)..(62): /note="This region represents a CpG dinucleotide"
  misc_feature (61)..(61): /note="Nucleotide may be methylated to form 5-methylcytosine"
ctccccagagcttgtgccctgactcactgactacgtcagcctcctcccaaggcataaatccgatcaacttttggttcattgtattaagaaagacttatgaagacaagggaaatgatgaaaga

SEQ ID NO: 27925 - DNA, 122 bp, Homo sapiens
  misc_feature (61)..(62): /note="This region represents a CpG dinucleotide"
  misc_feature (61)..(61): /note="Nucleotide may be methylated to form 5-methylcytosine"
gtttctttttttatttatagttctgcaaaatgcaatgtcagataaaatctggaagaaaagcgactaagaacgagaaaatcaaatgtattaagaatctggggctgggtgtggtggctcatgcc

SEQ ID NO: 27926 - DNA, 122 bp, Homo sapiens
  misc_feature (61)..(62): /note="This region represents a CpG dinucleotide"
  misc_feature (61)..(61): /note="Nucleotide may be methylated to form 5-methylcytosine"
tactgaagtgttacccgctataactcctatttgtttaaaagaaataagcgactcagagcgcggggtgtgaatactggagaggaagggaaaggtgggctgggcatgtaccggcgaggcaaggg

SEQ ID NO: 27927 - DNA, 122 bp, Homo sapiens
  misc_feature (61)..(62): /note="This region represents a CpG dinucleotide"
  misc_feature (61)..(61): /note="Nucleotide may be methylated to form 5-methylcytosine"
gtcccccttgagctaaataattatctcttgaagccacttgctatgctctagactaactcacgccaagtagccataaatgccatataccctatagctcaacaacgtgtagccaatcactaacc

SEQ ID NO: 27928 - DNA, 122 bp, Homo sapiens
  misc_feature (61)..(62): /note="This region represents a CpG dinucleotide"
  misc_feature (61)..(61): /note="Nucleotide may be methylated to form 5-methylcytosine"
gggtaacaaccactgcgtcccctgcaaggccgggcacttccagaatacctcctcccccagcgcccgctgccagccccacaccaggtgagtgcagccccacccaagctccttccaccctctga

SEQ ID NO: 27929 - DNA, 122 bp, Homo sapiens
  misc_feature (61)..(62): /note="This region represents a CpG dinucleotide"
  misc_feature (61)..(61): /note="Nucleotide may be methylated to form 5-methylcytosine"
atgtgatatgtataaggacagttgtcatttctgtaggagtaaatcaatttctttctcactcgcctcagaaggtatttatgtgagaatgaagttataatggagccacagttgaatccatacac

SEQ ID NO: 27930 - DNA, 122 bp, Homo sapiens
  misc_feature (61)..(62): /note="This region represents a CpG dinucleotide"
  misc_feature (61)..(61): /note="Nucleotide may be methylated to form 5-methylcytosine"
tgttttcagtttcacttctctttcttaagtcaggtaatcctgaggattttgccagtcacacgtgccacttgttctctacagtcccctctatgtactcttttcctgctctgctctatcaacat

SEQ ID NO: 27931 - DNA, 122 bp, Homo sapiens
  misc_feature (61)..(62): /note="This region represents a CpG dinucleotide"
  misc_feature (61)..(61): /note="Nucleotide may be methylated to form 5-methylcytosine"
gcttccggaagaggaaattagctggtgattctttccaatctgctttcccagtcacctttccggcatgttctgtaaaacaaaatgtaatttgactttgtttcattattttaactccataacac

SEQ ID NO: 27932 - DNA, 122 bp, Homo sapiens
  misc_feature (61)..(62): /note="This region represents a CpG dinucleotide"
  misc_feature (61)..(61): /note="Nucleotide may be methylated to form 5-methylcytosine"
aaactgagccagctacagggtggagatgaagagactcacccacatcacatcctaagtgagcgtgagagccagaattagaacccaggtctcctgacttgctctacagtcctgtctacttcctc

SEQ ID NO: 27933 - DNA, 122 bp, Homo sapiens
  misc_feature (61)..(62): /note="This region represents a CpG dinucleotide"
  misc_feature (61)..(61): /note="Nucleotide may be methylated to form 5-methylcytosine"
ccatttcctgataagcacagaaacaagaacgctttgtctcctgaggctggagctgagcagcggattctatttgttagggggcctcagaaagaaactgcccagtgcccctaagaatatttctc

SEQ ID NO: 27934 - DNA, 122 bp, Homo sapiens
  misc_feature (61)..(62): /note="This region represents a CpG dinucleotide"
  misc_feature (61)..(61): /note="Nucleotide may be methylated to form 5-methylcytosine"
ctgattacatcactggggtgtagcatgtttttctgccctcttatatttcctgtgagttggcgtcaaaggcttaattagattcaggtgttttgttttggatccagcattcttggtgcgttttt

SEQ ID NO: 27935 - DNA, 122 bp, Homo sapiens
  misc_feature (61)..(62): /note="This region represents a CpG dinucleotide"
  misc_feature (61)..(61): /note="Nucleotide may be methylated to form 5-methylcytosine"
ctgaggacaaaagacaatgagagcgtgacatcatgaagatcaaggaaagagacaatttcacgaaagcatgtgcaggcaacagtatttgcagagaggcaaactaaatcaagggctgaaaacca

SEQ ID NO: 27936 - DNA, 122 bp, Homo sapiens
  misc_feature (61)..(62): /note="This region represents a CpG dinucleotide"
  misc_feature (61)..(61): /note="Nucleotide may be methylated to form 5-methylcytosine"
cttataaggacccttgtgattatattagactcacctgtataatccaggataagctcaccacgtcaagatcagttgattagcaaacttaatcctgcccacttccttaattctcccttgaattg

SEQ ID NO: 27937 - DNA, 122 bp, Homo sapiens
  misc_feature (61)..(62): /note="This region represents a CpG dinucleotide"
  misc_feature (61)..(61): /note="Nucleotide may be methylated to form 5-methylcytosine"
ccgggagatgttatggggcaatgcttagctcccagctcccagactaaattctctaacttgcggggacttgcattgggcccgactttgttctctagctccttgaggttaggaatccactgcac

SEQ ID NO: 27938 - DNA, 122 bp, Homo sapiens
  misc_feature (61)..(62): /note="This region represents a CpG dinucleotide"
  misc_feature (61)..(61): /note="Nucleotide may be methylated to form 5-methylcytosine"
gaataaataaataacgaatgatttgtttggaaataaaacaaacactggctggggtagcagcgaagctgtaaaaggctaggctggggacctagtctggttgcctgttacatgcatggcttggg

SEQ ID NO: 27939 - DNA, 122 bp, Homo sapiens
  misc_feature (61)..(62): /note="This region represents a CpG dinucleotide"
  misc_feature (61)..(61): /note="Nucleotide may be methylated to form 5-methylcytosine"
gagctcctccttggtgccttaatttcctcatctgtagaatgcagataataacaaaatgtacgtcatagaactgttggggattaaatgagtaaatatttgtaaagcactttgaacagtgcctg

SEQ ID NO: 27940 - DNA, 122 bp, Homo sapiens
  misc_feature (61)..(62): /note="This region represents a CpG dinucleotide"
  misc_feature (61)..(61): /note="Nucleotide may be methylated to form 5-methylcytosine"
tcagactccaccagcattgtctgcactaacaacgaggcttagagatttgtccagtatgctcggggttgtggggtggtagcagtaaccagctggtgagcatcatctcttacatcagaatgaaa

SEQ ID NO: 27941 - DNA, 122 bp, Homo sapiens
  misc_feature (61)..(62): /note="This region represents a CpG dinucleotide"
  misc_feature (61)..(61): /note="Nucleotide may be methylated to form 5-methylcytosine"
gcccttcaagatcatcgaggctgcgtcgaacttccgctggtacctgcccaaggtcgtctgcgccctcacgagttttggcttctacagcagcatctactgcagcacgtggctcctggcgggca

SEQ ID NO: 27942 - DNA, 122 bp, Homo sapiens
  misc_feature (61)..(62): /note="This region represents a CpG dinucleotide"
  misc_feature (61)..(61): /note="Nucleotide may be methylated to form 5-methylcytosine"
acaaaggaaagtttcaggtcgcaatagtctactgagtctttgaaaagccgaactttagaacgaatagagccaaaggctcaagtctgtgattaggctgaaccacatgaaattgagatttttgt

SEQ ID NO: 27943 - DNA, 122 bp, Homo sapiens
  misc_feature (61)..(62): /note="This region represents a CpG dinucleotide"
  misc_feature (61)..(61): /note="Nucleotide may be methylated to form 5-methylcytosine"
agattgcttctagagatcttttgaaaatttcacacgattgaaggcttaggggcttcactgcgttcgcatttcaaactcagatcagtgggatcacaatcaaaaatagaggtctggaaaatttt

SEQ ID NO: 27944 - DNA, 122 bp, Homo sapiens
  misc_feature (61)..(62): /note="This region represents a CpG dinucleotide"
  misc_feature (61)..(61): /note="Nucleotide may be methylated to form 5-methylcytosine"
gacttcaaagtgctggctgctgtgctaacgaggagagatttgcataaggccctaatcacgcgcatactgattaagcttcattatggaaactgccagctgcaatctttgtttctattttatta

SEQ ID NO: 27945 - DNA, 122 bp, Homo sapiens
  misc_feature (61)..(62): /note="This region represents a CpG dinucleotide"
  misc_feature (61)..(61): /note="Nucleotide may be methylated to form 5-methylcytosine"
ctgactccatggtgtagtctaggtcatactttatgttgtgaggctgtgactggattatgtcgcacttcatgaaacctaaggcttcctgttcagacctgaaaggcagaaactgtgtctccttc

SEQ ID NO: 27946 - DNA, 122 bp, Homo sapiens
  misc_feature (61)..(62): /note="This region represents a CpG dinucleotide"
  misc_feature (61)..(61): /note="Nucleotide may be methylated to form 5-methylcytosine"
tacattctcaggactcttaacccaagatgagtgacatgcttcgaggctatccagctctgacgggtacagatggatgactcagtacatctcgatctttcagtcaagggcatctatttgtttcc

SEQ ID NO: 27947 - DNA, 122 bp, Homo sapiens
  misc_feature (61)..(62): /note="This region represents a CpG dinucleotide"
  misc_feature (61)..(61): /note="Nucleotide may be methylated to form 5-methylcytosine"
ctcttaccacctatatccagccagataaataagctctcatcagccattttgaaatctgcacgtgtgtgacctaaaagcatcattgctacataaccaattgctcaatggtttgggtcattcaa

SEQ ID NO: 27948 - DNA, 122 bp, Homo sapiens
  misc_feature (61)..(62): /note="This region represents a CpG dinucleotide"
  misc_feature (61)..(61): /note="Nucleotide may be methylated to form 5-methylcytosine"
gaatgtgcatgttgggtgactcaggtttttcactgctctgcacatgttcatgaatgaccacgagagtgcagtaaatattgattttgggattacaaataaattttagtgagtaggcaaataag

SEQ ID NO: 27949 - DNA, 122 bp, Homo sapiens
  misc_feature (61)..(62): /note="This region represents a CpG dinucleotide"
  misc_feature (61)..(61): /note="Nucleotide may be methylated to form 5-methylcytosine"
agggctcatttttcctagggcataaactgatactaagtcacactgggagagcctatgatccgtgtatatttctggcagggcagaattttctctatattgacaggcacagcaacattgattgt

SEQ ID NO: 27950 - DNA, 122 bp, Homo sapiens
  misc_feature (61)..(62): /note="This region represents a CpG dinucleotide"
  misc_feature (61)..(61): /note="Nucleotide may be methylated to form 5-methylcytosine"
aattttaatcagtgggaaatgctgactgccacgctcatttaagaggaaaggtcaggatttcgtgagctgcattgttcactgacatctactttaacgactccagcccagcctgagctaatctt

SEQ ID NO: 27951 - DNA, 122 bp, Homo sapiens
  misc_feature (61)..(62): /note="This region represents a CpG dinucleotide"
  misc_feature (61)..(61): /note="Nucleotide may be methylated to form 5-methylcytosine"
gatgccagctgtacatttctcttcacaggtgagtacattccttggcgctttaagtgatcacgtgccttccgaatgccaggtgcggcgcccgctctgcgctgctcgctgcaactgctcccacc

SEQ ID NO: 27952 - DNA, 122 bp, Homo sapiens
  misc_feature (61)..(62): /note="This region represents a CpG dinucleotide"
  misc_feature (61)..(61): /note="Nucleotide may be methylated to form 5-methylcytosine"
agcagccttttggaaaacaatccggcaagagccaggaaaatggcagctgcaggccaggtgcggtggcagtggctcatgcctgtaatcccagcactctgggaggccgagatgggtggatcacc

SEQ ID NO: 27953 - DNA, 122 bp, Homo sapiens
  misc_feature (61)..(62): /note="This region represents a CpG dinucleotide"
  misc_feature (61)..(61): /note="Nucleotide may be methylated to form 5-methylcytosine"
gacaggtgaccattctaaaaatggctgggaacttgaggccagcacagtttctgttctgaacgtgtcaagttctcaggcgagtttgtcttaacaagtcccatcaccatgggacttttgttgtc

SEQ ID NO: 27954 - DNA, 122 bp, Homo sapiens
  misc_feature (61)..(62): /note="This region represents a CpG dinucleotide"
  misc_feature (61)..(61): /note="Nucleotide may be methylated to form 5-methylcytosine"
tgcatcagctgcctccttcttatccacccccatgctggccccaagagggattttctgaaacgccagtcaccacctacattcactgacttgctccagtcactgtaggcataaacacaagtaag

SEQ ID NO: 27955 - DNA, 122 bp, Homo sapiens
  misc_feature (61)..(62): /note="This region represents a CpG dinucleotide"
  misc_feature (61)..(61): /note="Nucleotide may be methylated to form 5-methylcytosine"
ggtaatccgcctgcctccatctcccaaattgctgggattacaggcatgagccaccacacccggcctaaaactagagacttcttaactaccttagagagtatagatagggctgggcatggcgg

SEQ ID NO: 27956 - DNA, 122 bp, Homo sapiens
  misc_feature (61)..(62): /note="This region represents a CpG dinucleotide"
  misc_feature (61)..(61): /note="Nucleotide may be methylated to form 5-methylcytosine"
aaaataatgactcagatttcaagggtttctttttcttccttctacaaagaaatacagtcacgtactgcataacaaggttttggccaaggacatgctgcctacatgatggtaggcccataaga

SEQ ID NO: 27957 - DNA, 122 bp, Homo sapiens
  misc_feature (61)..(62): /note="This region represents a CpG dinucleotide"
  misc_feature (61)..(61): /note="Nucleotide may be methylated to form 5-methylcytosine"
ggactcttaatcttttgccatggctctgcactcacatagaaggcacctgtggcaattgagcgcctgcaatttcactataagctttacttagcagcactcagaatgttaagtagataaacggg

SEQ ID NO: 27958 - DNA, 122 bp, Homo sapiens
  misc_feature (61)..(62): /note="This region represents a CpG dinucleotide"
  misc_feature (61)..(61): /note="Nucleotide may be methylated to form 5-methylcytosine"
ttcaaaggggtatgcaagtactctagttcaagaaccaggaggctcagtataatccacactcgctgtggcctggcttggccactgggactgtcagaggcattcgaaccagaacaacttcatct

SEQ ID NO: 27959 - DNA, 122 bp, Homo sapiens
  misc_feature (61)..(62): /note="This region represents a CpG dinucleotide"
  misc_feature (61)..(61): /note="Nucleotide may be methylated to form 5-methylcytosine"
attgccagagaactgcagctgcttgcactgcaactaaaaagtcgatcttaaactctggggcgaaccctagaaaagacagcaagaagtaaaccaatagaaaaaccactccaggtttattctgg

SEQ ID NO: 27960 - DNA, 122 bp, Homo sapiens
  misc_feature (61)..(62): /note="This region represents a CpG dinucleotide"
  misc_feature (61)..(61): /note="Nucleotide may be methylated to form 5-methylcytosine"
atgggtttaggagagagagggtgtaactgctaacggatgcagggttactttttggggtgacgaaaatgtaaaattaggttgtggtgatggttgcacaacaccatgaatatactaaaaaccac

SEQ ID NO: 27961 - DNA, 122 bp, Homo sapiens
  misc_feature (61)..(62): /note="This region represents a CpG dinucleotide"
  misc_feature (61)..(61): /note="Nucleotide may be methylated to form 5-methylcytosine"
gccctgtggcaggaatgattcagagcccaggtcagactctaggaggtctggctcttgggacgcatgaagaatagcacccacgcacctgagacaggtgcaggtctatgtatgtttcagcctcc

SEQ ID NO: 27962 - DNA, 122 bp, Homo sapiens
  misc_feature (61)..(62): /note="This region represents a CpG dinucleotide"
  misc_feature (61)..(61): /note="Nucleotide may be methylated to form 5-methylcytosine"
agtttaaatgtgagagtgctgggtagttgaaagtggggaaaaagatggtgtaaggaactacgctcaagtgcaatgtgcaaagtgaagaatgctgtacacgaggagactaaaagaatgacaga

SEQ ID NO: 27963 - DNA, 122 bp, Homo sapiens
  misc_feature (61)..(62): /note="This region represents a CpG dinucleotide"
  misc_feature (61)..(61): /note="Nucleotide may be methylated to form 5-methylcytosine"
gtgactaagggagggctctaaacagctctggccaaaggaacttcatgctgggatggccaccgtctatattcacactgtctcattagtagccatgctgtctgctcggcacttgaaatgtggct

SEQ ID NO: 27964 - DNA, 122 bp, Homo sapiens
  misc_feature (61)..(62): /note="This region represents a CpG dinucleotide"
  misc_feature (61)..(61): /note="Nucleotide may be methylated to form 5-methylcytosine"
gcatcgctcaaatgtaagggattattatggcccatggagtgagaagccacagatcttgtacgggaaattctatcctaggcagcagaaaggctgtttgaaacatgaagcctaaggagggaact

SEQ ID NO: 27965 - DNA, 122 bp, Homo sapiens
  misc_feature (61)..(62): /note="This region represents a CpG dinucleotide"
  misc_feature (61)..(61): /note="Nucleotide may be methylated to form 5-methylcytosine"
ctcaagttatgtgatagtgcctggatcttaagcccttcaaaacttatgttgaaatttgatcgccagtgttggaggtggggcctgatgggaggtgtttgtgtcctcatattgagaaacttctc

SEQ ID NO: 27966 - DNA, 122 bp, Homo sapiens
  misc_feature (61)..(62): /note="This region represents a CpG dinucleotide"
  misc_feature (61)..(61): /note="Nucleotide may be methylated to form 5-methylcytosine"
gcaacactgcacacatggggttcatcaaaaagccatttgcaggcagggtgtggtggctcacgcctgtaatctcagcactttgggaagctgaggcgagtggatcatctgaggtcaggagttca

SEQ ID NO: 27967 - DNA, 122 bp, Homo sapiens
  misc_feature (61)..(62): /note="This region represents a CpG dinucleotide"
  misc_feature (61)..(61): /note="Nucleotide may be methylated to form 5-methylcytosine"
gaaaataacaacttttatctgcccagtaaggacaactaacacctagtatcataatcatttcgtaagagacaggtaatttcatcaccgagtgcatatgttttctaatgctcttatatcaaatt

SEQ ID NO: 27968 - DNA, 122 bp, Homo sapiens
  misc_feature (61)..(62): /note="This region represents a CpG dinucleotide"
  misc_feature (61)..(61): /note="Nucleotide may be methylated to form 5-methylcytosine"
aggatcacattctaccttgtgtgtccctagctccccgcacagtgcttgatacataggaaacgtctgctgaaatgcagagctgcacagaactcaagaaaaaaaaagggaggctacaaacccag

SEQ ID NO: 27969 - DNA, 122 bp, Homo sapiens
  misc_feature (61)..(62): /note="This region represents a CpG dinucleotide"
  misc_feature (61)..(61): /note="Nucleotide may be methylated to form 5-methylcytosine"
ttgaaaataaatcaaaaatgtataatgactcaaacacaatagaaatttatttccttcccacgtaacagtctgaggcagttgttcctggtcattaagtgggtccacttcacacagtgattcag

SEQ ID NO: 27970 - DNA, 122 bp, Homo sapiens
  misc_feature (61)..(62): /note="This region represents a CpG dinucleotide"
  misc_feature (61)..(61): /note="Nucleotide may be methylated to form 5-methylcytosine"
ttcatttgggaaacattaaagaccacaaatctatatttcagaaccatactttaatgcctgcgaaatagtctacctttcaacgactgaatttatttaaccaatttccttctgctgaacactca

SEQ ID NO: 27971 - DNA, 122 bp, Homo sapiens
  misc_feature (61)..(62): /note="This region represents a CpG dinucleotide"
  misc_feature (61)..(61): /note="Nucleotide may be methylated to form 5-methylcytosine"
tttctttttcaattaaagctggtgctgctggagttgctggtctttgatgctgagggattacgtttctgatagttaccgaaaggataataacaaaacttttattgtgctctaatttagacatt

SEQ ID NO: 27972 - DNA, 122 bp, Homo sapiens
  misc_feature (61)..(62): /note="This region represents a CpG dinucleotide"
  misc_feature (61)..(61): /note="Nucleotide may be methylated to form 5-methylcytosine"
cgcacattgcacaatatgcagaaaacagctttggcctgggcgttgcggaaaaggtgattgcgaaaacacatgtggacgctggatttcacaattctgggattagacaaggaagaatttctaaa

SEQ ID NO: 27973 - DNA, 122 bp, Homo sapiens
  misc_feature (61)..(62): /note="This region represents a CpG dinucleotide"
  misc_feature (61)..(61): /note="Nucleotide may be methylated to form 5-methylcytosine"
ttgctacataaaaattaccacaaatttcgtgacttaaaacgacacccatttttcagtttgcggttttgtaagtcgaaagttcaatgctttcacaatcaaacaggagacaacagtgggtctag

SEQ ID NO: 27974 - DNA, 122 bp, Homo sapiens
  misc_feature (61)..(62): /note="This region represents a CpG dinucleotide"
  misc_feature (61)..(61): /note="Nucleotide may be methylated to form 5-methylcytosine"
gtcctcagccaggcacacaggtttcaccctgcaggcacccgaagttcagaatcactgaggcggatgtttatctaagagcacggaggctccagtgagatgtgcattcctcttgttgtcttctt

SEQ ID NO: 27975 - DNA, 122 bp, Homo sapiens
  misc_feature (61)..(62): /note="This region represents a CpG dinucleotide"
  misc_feature (61)..(61): /note="Nucleotide may be methylated to form 5-methylcytosine"
gaaagattccacagtgaatcagaggcagtacgtggactttaaagctcatagggctgggcgcggtggctcacgtctataatcccaacactttgggaggccaaggcaggtggatcacaaggttg

SEQ ID NO: 27976 - DNA, 122 bp, Homo sapiens
  misc_feature (61)..(62): /note="This region represents a CpG dinucleotide"
  misc_feature (61)..(61): /note="Nucleotide may be methylated to form 5-methylcytosine"
tggaaagctttatgtggtggattccataaatgacttaaacaaactaaacctctgtccagccggatcgcagcatctgttccgtatgtgtgctggggaaggcacagcagcccttcctagcttct

SEQ ID NO: 27977 - DNA, 122 bp, Homo sapiens
  misc_feature (61)..(62): /note="This region represents a CpG dinucleotide"
  misc_feature (61)..(61): /note="Nucleotide may be methylated to form 5-methylcytosine"
ctataccatttcctgtaagtctcttgccttaggctttaccccatttttcaatgactcaagcgtcttctaattgggccagtcctgcctcttgggctcctttgatcatctggttttcccttctg

SEQ ID NO: 27978 - DNA, 122 bp, Homo sapiens
  misc_feature (61)..(62): /note="This region represents a CpG dinucleotide"
  misc_feature (61)..(61): /note="Nucleotide may be methylated to form 5-methylcytosine"
ttgtgctatgatattacaaaggcaacaatgtcaatagaaatttttcagttccattataatcgtatggagtcttcatagtacatactgtacagcctgttgttgactgaaagagcattatttgg

SEQ ID NO: 27979 - DNA, 122 bp, Homo sapiens
  misc_feature (61)..(62): /note="This region represents a CpG dinucleotide"
  misc_feature (61)..(61): /note="Nucleotide may be methylated to form 5-methylcytosine"
aatttacttaagtgatacatatttttaatcctaattaggaaacagctttgaagtgtggagcgggaaaggagcagtttctgagctgcaaaaactagtttctaaacaggtaatttgacattatt

SEQ ID NO: 27980 - DNA, 122 bp, Homo sapiens
  misc_feature (61)..(62): /note="This region represents a CpG dinucleotide"
  misc_feature (61)..(61): /note="Nucleotide may be methylated to form 5-methylcytosine"
actgggagaggaaaacccaccctcatcagtgtgggtgggcaccatccaattggctgccaccgaggctagaacaaagcaggtggaagaagatgggataagctggcttgctaagtcttttggct

SEQ ID NO: 27981 - DNA, 122 bp, Homo sapiens
  misc_feature (61)..(62): /note="This region represents a CpG dinucleotide"
  misc_feature (61)..(61): /note="Nucleotide may be methylated to form 5-methylcytosine"
tctataggccatatccatgaatcagacagagtagactctttagcctgtttcttcaaaaaacgatgtccattgcatagggttgaaagatcataattccagcaggaatttgcaacttcgctgac

SEQ ID NO: 27982 - DNA, 122 bp, Homo sapiens
  misc_feature (61)..(62): /note="This region represents a CpG dinucleotide"
  misc_feature (61)..(61): /note="Nucleotide may be methylated to form 5-methylcytosine"
attttatgtgacatatcacacaacccagtgcatggtttacacaggtattattattattctcgagattcagagatgcagaaagatccaaaaacagcccaaggtcactgagccattgctgacag

SEQ ID NO: 27983 - DNA, 122 bp, Homo sapiens
  misc_feature (61)..(62): /note="This region represents a CpG dinucleotide"
  misc_feature (61)..(61): /note="Nucleotide may be methylated to form 5-methylcytosine"
attcaggtgaaaaggtgaaaatgatcatccaggagacaaagactccagagaaatgggatccgtgctccaaagttaagagttaagttcttgctaatacaggtagaaaacaaagaaatttaatg

SEQ ID NO: 27984 - DNA, 122 bp, Homo sapiens
  misc_feature (61)..(62): /note="This region represents a CpG dinucleotide"
  misc_feature (61)..(61): /note="Nucleotide may be methylated to form 5-methylcytosine"
aaaacgtggcttatccatacaatggcatatgattcagccttaaaaaagaaatcttgagcacgctacaacagggatgaacctggaggacatcacgctgaatgaaataagccaggcacaaaagg

SEQ ID NO: 27985 - DNA, 122 bp, Homo sapiens
  misc_feature (61)..(62): /note="This region represents a CpG dinucleotide"
  misc_feature (61)..(61): /note="Nucleotide may be methylated to form 5-methylcytosine"
tgagtgggctgtttcggcaaccaaaatcccacaaccaccaaggtgattaagggctcacaccgttcagtgtaaaagaactgggtcaccttgcccagtgagcagcagagatcagcatgctggca

SEQ ID NO: 27986 - DNA, 122 bp, Homo sapiens
  misc_feature (61)..(62): /note="This region represents a CpG dinucleotide"
  misc_feature (61)..(61): /note="Nucleotide may be methylated to form 5-methylcytosine"
tctatgtttcaatgtcatctcagaaactgctcatatctatgctggcttctattttcattccgtaaagctagccaagggagctatgttttacgaggacatgcagtttcaacttcgtatcattc

SEQ ID NO: 27987 - DNA, 122 bp, Homo sapiens
  misc_feature (61)..(62): /note="This region represents a CpG dinucleotide"
  misc_feature (61)..(61): /note="Nucleotide may be methylated to form 5-methylcytosine"
aagtgtgcagaaaaatgagtcaccttcaatatgaaggatgtgagttgtgtacactgacaacggtctcaaagatacaacattattgcaggaggaatgcctgtgtacagagtggaccatcttat

SEQ ID NO: 27988 - DNA, 122 bp, Homo sapiens
  misc_feature (61)..(62): /note="This region represents a CpG dinucleotide"
  misc_feature (61)..(61): /note="Nucleotide may be methylated to form 5-methylcytosine"
taaaaggatcttctgcttcctcctcgtttacacccggtccttgggaggcaagataaagtacgcagagatgccaagagttgccacttgggcaccaaagggctctaataaacttcatctgcact

SEQ ID NO: 27989 - DNA, 122 bp, Homo sapiens
  misc_feature (61)..(62): /note="This region represents a CpG dinucleotide"
  misc_feature (61)..(61): /note="Nucleotide may be methylated to form 5-methylcytosine"
ttttcctcattaggaaagtcaaagaaaggaacagtggtattacttcttagatggtcacaacgtgtgcgtgaaccttcttagtgtttaaatccaaagtagtgcttctgagatttcaaatgttt

SEQ ID NO: 27990 - DNA, 122 bp, Homo sapiens
  misc_feature (61)..(62): /note="This region represents a CpG dinucleotide"
  misc_feature (61)..(61): /note="Nucleotide may be methylated to form 5-methylcytosine"
ctgcagagactcagcagcgggtgagcggctgggcccggctcagggagggggcttctaccacgggcccagcctgaacccaaagttagcctgacccctgacccctggctccgcagttttgatga

SEQ ID NO: 27991 - DNA, 122 bp, Homo sapiens
  misc_feature (61)..(62): /note="This region represents a CpG dinucleotide"
  misc_feature (61)..(61): /note="Nucleotide may be methylated to form 5-methylcytosine"
acaagcaggaataaaaggccaccagagtcacagagacgaagctgcggcgttaccgaggtgcgaatcactgtgattcctaggtgcgaatcatcaccagcaatcacttctctcaggactccttg

SEQ ID NO: 27992 - DNA, 122 bp, Homo sapiens
  misc_feature (61)..(62): /note="This region represents a CpG dinucleotide"
  misc_feature (61)..(61): /note="Nucleotide may be methylated to form 5-methylcytosine"
aaacagagggtgggttttgatttgcaagaggaagtgaaaggaagacagtaagtcccatgacgagaacctggtgaactatgttgaggaatttggacttaaatttataaggtgtcagagtctgt

SEQ ID NO: 27993 - DNA, 122 bp, Homo sapiens
  misc_feature (61)..(62): /note="This region represents a CpG dinucleotide"
  misc_feature (61)..(61): /note="Nucleotide may be methylated to form 5-methylcytosine"
tgcctccctgttggggtccacgggcagcctgtccatgggtgctttgtcctttcaggctggcgtgcaggtgcccaacccacactcctgccccacaggcacaacaggcaggacaggccccatag

SEQ ID NO: 27994 - DNA, 122 bp, Homo sapiens
  misc_feature (61)..(62): /note="This region represents a CpG dinucleotide"
  misc_feature (61)..(61): /note="Nucleotide may be methylated to form 5-methylcytosine"
ttgtggttagtgtgaatatgtagcttcttcccagaacaaccatttcgacagttcctgcagcgtggtgaaatttcctgttctttgttttgctgctttctctccatggataaaaactatgagta

SEQ ID NO: 27995 - DNA, 122 bp, Homo sapiens
  misc_feature (61)..(62): /note="This region represents a CpG dinucleotide"
  misc_feature (61)..(61): /note="Nucleotide may be methylated to form 5-methylcytosine"
gtcagactgtcttgtgggagtggggcatgcagattaaaaatgacttcacagcccctccctcgcaggttagggagcatgacatctattggcagctgggcatctgatggctgagagccaggcac

SEQ ID NO: 27996 - DNA, 122 bp, Homo sapiens
  misc_feature (61)..(62): /note="This region represents a CpG dinucleotide"
  misc_feature (61)..(61): /note="Nucleotide may be methylated to form 5-methylcytosine"
tccaatggcctctgccttcctcagacacctccctcgcttcagcggtttcagtaaccataccggggctgcttcctgcccatgtttttgcccatgctttttacagcatttaaaaatgtatatgt

SEQ ID NO: 27997 - DNA, 122 bp, Homo sapiens
  misc_feature (61)..(62): /note="This region represents a CpG dinucleotide"
  misc_feature (61)..(61): /note="Nucleotide may be methylated to form 5-methylcytosine"
tagtttctgaggctggcagcctgtagtacatgtatcagggagggcctgaggaacaattcccgtctgcacataggaactgccctgtccagtgtccatgggttcagaggcaccagaagcacctg

SEQ ID NO: 27998 - DNA, 122 bp, Homo sapiens
  misc_feature (61)..(62): /note="This region represents a CpG dinucleotide"
  misc_feature (61)..(61): /note="Nucleotide may be methylated to form 5-methylcytosine"
tccttttccatatactacaggggcggtgtaagaactttcccgagccatcggaggcatcaacgggaatcactggaataataatattagtaaagttgtttttatgaccacttaagtttacaaca

SEQ ID NO: 27999 - DNA, 122 bp, Homo sapiens
  misc_feature (61)..(62): /note="This region represents a CpG dinucleotide"
  misc_feature (61)..(61): /note="Nucleotide may be methylated to form 5-methylcytosine"
gacccatgagcactgacagttaatgtgcccagcacactgtggggcacagtcagcactcagcgcgcggccaccagccacattctttaaagaacaattcaagtgccacctccttcaggaagtcc

SEQ ID NO: 28000 - DNA, 122 bp, Homo sapiens
  misc_feature (61)..(62): /note="This region represents a CpG dinucleotide"
  misc_feature (61)..(61): /note="Nucleotide may be methylated to form 5-methylcytosine"
tcctttgcagcacctgctaatgatctgtcagtgacgctgtgaccaaggctcatcaccctgcgggccgtgggccccagagggcggcacagcttctataggagcacagggcccagggaggtgcc

SEQ ID NO: 28001 - DNA, 122 bp, Homo sapiens
  misc_feature (61)..(62): /note="This region represents a CpG dinucleotide"
  misc_feature (61)..(61): /note="Nucleotide may be methylated to form 5-methylcytosine"
ctggaaagatgagcctccgcatacctgttacataagacaaagtgtgacaaatgttaggagcgggtaagaaacattatgctgtaaggcttaaggaaaagaaagcaagttactcaagtacaggg

SEQ ID NO: 28002 - DNA, 122 bp, Homo sapiens
  misc_feature (61)..(62): /note="This region represents a CpG dinucleotide"
  misc_feature (61)..(61): /note="Nucleotide may be methylated to form 5-methylcytosine"
agcagtttgggccaactgcaacccagatggtcaatcagtgtggtttcattaaaatgtcatcgtcttcttgtctgtggtcaagctctaaccccaaagcggaactgaattgacttttcaaagcc

SEQ ID NO: 28003 - DNA, 122 bp, Homo sapiens
  misc_feature (61)..(62): /note="This region represents a CpG dinucleotide"
  misc_feature (61)..(61): /note="Nucleotide may be methylated to form 5-methylcytosine"
cagtattttcattctctacacttttcttctccttatattcttttaggctagtctttgaaacgtcagtctctgtccattgaaactaaaataagaaagaaggagaaaaggaaattgatgtcttt

SEQ ID NO: 28004 - DNA, 122 bp, Homo sapiens
  misc_feature (61)..(62): /note="This region represents a CpG dinucleotide"
  misc_feature (61)..(61): /note="Nucleotide may be methylated to form 5-methylcytosine"
ccagctgcttgggatggttctaaattccactcagagccctggaatgtgatgcctccaaggcgccagtcctgtgaatcccttcctggtgctcacagagggacagcggcaggtgtgcagaggcc

SEQ ID NO: 28005 - DNA, 122 bp, Homo sapiens
  misc_feature (61)..(62): /note="This region represents a CpG dinucleotide"
  misc_feature (61)..(61): /note="Nucleotide may be methylated to form 5-methylcytosine"
tggggggtgtcagggcagactccaccaggagacctgacctttgatctgggcttaggagcacgagttgaggtggggaggagcacatttcttcctggaagaagggcagtgtgttcagaagcaca

SEQ ID NO: 28006 - DNA, 122 bp, Homo sapiens
  misc_feature (61)..(62): /note="This region represents a CpG dinucleotide"
  misc_feature (61)..(61): /note="Nucleotide may be methylated to form 5-methylcytosine"
gagacaccctgcccagccctcactattgtttttatttgcattcctttctttttatttttgcgaggcagaagttgcttctctttctgtggttaaaaaccaacaacctgcatttcctcctctgt

SEQ ID NO: 28007 - DNA, 122 bp, Homo sapiens
  misc_feature (61)..(62): /note="This region represents a CpG dinucleotide"
  misc_feature (61)..(61): /note="Nucleotide may be methylated to form 5-methylcytosine"
accgcctgcacggccagcccgctcctgaggctgctgatttgggtctgggaagaacagtcacggcttctgctggccagcggggtggcgggcaccagccacgaggtgtctgtggtgctggcctc

SEQ ID NO: 28008 - DNA, 122 bp, Homo sapiens
  misc_feature (61)..(62): /note="This region represents a CpG dinucleotide"
  misc_feature (61)..(61): /note="Nucleotide may be methylated to form 5-methylcytosine"
ctcgatctcctgaccttgtgatccgcctgcctctgcctcccagagtgctgggattacaggcgtgagccacttctggctttttgagacactagaggagctggcattactggacctgtgatgtg

SEQ ID NO: 28009 - DNA, 122 bp, Homo sapiens
  misc_feature (61)..(62): /note="This region represents a CpG dinucleotide"
  misc_feature (61)..(61): /note="Nucleotide may be methylated to form 5-methylcytosine"
gctattgggggaaggggctcagaggagatacccaccatgtacactgctgaccttatacaccgctgagctagaacgactggaagaaccttattagtgaggtgattaaggaggtggatgacaag

SEQ ID NO: 28010 - DNA, 122 bp, Homo sapiens
  misc_feature (61)..(62): /note="This region represents a CpG dinucleotide"
  misc_feature (61)..(61): /note="Nucleotide may be methylated to form 5-methylcytosine"
tcctttctcttgcggttggacagtcatgacaaaatgtaaactacactcatggtactttttcgttgttgtaaggaatcaggtttcttgctgtaaaggcaaatgactaaaccttattttgattg

SEQ ID NO: 28011 - DNA, 122 bp, Homo sapiens
  misc_feature (61)..(62): /note="This region represents a CpG dinucleotide"
  misc_feature (61)..(61): /note="Nucleotide may be methylated to form 5-methylcytosine"
caaaatatgattctgctacttcccagttgtgcgatcctgggcatgtacacaggatgttcacgacagcacagcatctactactgtttgcagtagcaatgcatgaggaacaactttactgtcta

SEQ ID NO: 28012 - DNA, 122 bp, Homo sapiens
  misc_feature (61)..(62): /note="This region represents a CpG dinucleotide"
  misc_feature (61)..(61): /note="Nucleotide may be methylated to form 5-methylcytosine"
gtccccctgcaggcagcttgcaaagagcagaggcttggaaaggagaagtggggcaggaagcgcagaaagtgcaggattctgcggttagcatttcaaaaacattgcccttctctgatataaag

SEQ ID NO: 28013 - DNA, 122 bp, Homo sapiens
  misc_feature (61)..(62): /note="This region represents a CpG dinucleotide"
  misc_feature (61)..(61): /note="Nucleotide may be methylated to form 5-methylcytosine"
tcggtgcgcgctcaggctgattccacagctgtgctgttgggaatggcgctgtggtgaacgcgggcgtgcagatgtctcgtcggcagatgagttcatttcctgtcagttatacccggtaatgg

SEQ ID NO: 28014 - DNA, 122 bp, Homo sapiens
  misc_feature (61)..(62): /note="This region represents a CpG dinucleotide"
  misc_feature (61)..(61): /note="Nucleotide may be methylated to form 5-methylcytosine"
aagttccagtcttttcttcaaagcaagtaaacatgttttcaagaattctttaaataattgcgcttatgttttcaattgtgatgaactcagttgattctttgacttggcttggcagaaacctg

SEQ ID NO: 28015 - DNA, 122 bp, Homo sapiens
  misc_feature (61)..(62): /note="This region represents a CpG dinucleotide"
  misc_feature (61)..(61): /note="Nucleotide may be methylated to form 5-methylcytosine"
gtcaggccgaagaggtgggaagcccagggcgctgtggaatccccaaggaagtgcctcattcgtgggagggctgggcaggcgacctggaggatgtgggtttcgtgggagggctgggcaggcga

SEQ ID NO: 28016 - DNA, 122 bp, Homo sapiens
  misc_feature (61)..(62): /note="This region represents a CpG dinucleotide"
  misc_feature (61)..(61): /note="Nucleotide may be methylated to form 5-methylcytosine"
tgtggccaggctgtaggttgccgaagtcaaagaggaccatgtaggctgtaatgtaattgacgagcaaggcagcagcttcctcaaaggtcatggcctcaggaatcaggaaggtctggaccgag

SEQ ID NO: 28017 - DNA, 122 bp, Homo sapiens
  misc_feature (61)..(62): /note="This region represents a CpG dinucleotide"
  misc_feature (61)..(61): /note="Nucleotide may be methylated to form 5-methylcytosine"
gaatagaaagcttcatcagcagctgcaagaagcccaggcatgataagcaggggtatgcaacgtgagtgagcactcgcctcatggaaaaaacagctcacagcaggagctcacagaacttccat

SEQ ID NO: 28018 - DNA, 122 bp, Homo sapiens
  misc_feature (61)..(62): /note="This region represents a CpG dinucleotide"
  misc_feature (61)..(61): /note="Nucleotide may be methylated to form 5-methylcytosine"
ctcacacctcccggttacttctcctcttcccagggacccagacggggagagggtgctgggcgccggcaagccacagcgtctgctctcatgatctcgcccccacccgccttgggcccccagag

SEQ ID NO: 28019 - DNA, 122 bp, Homo sapiens
  misc_feature (61)..(62): /note="This region represents a CpG dinucleotide"
  misc_feature (61)..(61): /note="Nucleotide may be methylated to form 5-methylcytosine"
tgcactgttcctcattagaaggataatgccattataatagctttactctgaggcataaagcggttaaatgaagcaccagaaaaggaaaagcaaaagtttgtttggtgaatcattcttttcta

SEQ ID NO: 28020 - DNA, 122 bp, Homo sapiens
  misc_feature (61)..(62): /note="This region represents a CpG dinucleotide"
  misc_feature (61)..(61): /note="Nucleotide may be methylated to form 5-methylcytosine"
agcctgctcagcaacccaaacagctatgagacagctgctgcattaaagctgatgacttcacgcagctcattctgtcaagtaagcgttatcattatttaaatgacagagtggtatgaggtacg

SEQ ID NO: 28021 - DNA, 122 bp, Homo sapiens
  misc_feature (61)..(62): /note="This region represents a CpG dinucleotide"
  misc_feature (61)..(61): /note="Nucleotide may be methylated to form 5-methylcytosine"
ttgcaaaaatcccttagtttcatttctactttactctatttcagtccccaatgccaagttcgttctttttgtaagtatcttctgaaggagtgactcaccatttacttctattggaatccaaa

SEQ ID NO: 28022 - DNA, 122 bp, Homo sapiens
  misc_feature (61)..(62): /note="This region represents a CpG dinucleotide"
  misc_feature (61)..(61): /note="Nucleotide may be methylated to form 5-methylcytosine"
gttagaaatgaccagcagccagttcccccaaggctaaggcagccagtgcagactcttggtcgtctagaatatggaaggtcctgaaccacagcaatgaaagggtagaaatcaagtagcagaaa

SEQ ID NO: 28023 - DNA, 122 bp, Homo sapiens
  misc_feature (61)..(62): /note="This region represents a CpG dinucleotide"
  misc_feature (61)..(61): /note="Nucleotide may be methylated to form 5-methylcytosine"
aaaaagtttccaatctttacaaaatatcaattaaaaaaggagaagaagatcactctgtggcgctaagagagagcacacagggagatgatgcagtcatttaaaataggcatgtcagcaaataa

SEQ ID NO: 28024 - DNA, 122 bp, Homo sapiens
  misc_feature (61)..(62): /note="This region represents a CpG dinucleotide"
  misc_feature (61)..(61): /note="Nucleotide may be methylated to form 5-methylcytosine"
tcacttagtgcccgtgattataaagccatacccagtgtgctgtctaatcttattctttaccgttgccatgaacctgtgtgagaactgtctgatggggcaagaagcagacaggcactcagaaa

SEQ ID NO: 28025 - DNA, 122 bp, Homo sapiens
  misc_feature (61)..(62): /note="This region represents a CpG dinucleotide"
  misc_feature (61)..(61): /note="Nucleotide may be methylated to form 5-methylcytosine"
atgaatgtggttttcagccagggagtctagacttctttgatagataccttgctccatgcccgccttctctcctggaaaccacttttctggacccagcagggtggtggtgctcagtcagggct

SEQ ID NO: 28026 - DNA, 122 bp, Homo sapiens
  misc_feature (61)..(62): /note="This region represents a CpG dinucleotide"
  misc_feature (61)..(61): /note="Nucleotide may be methylated to form 5-methylcytosine"
tcgtgtttgctgtgttttaaagatgacctactagttcatcagtgggtccagaccctgcaccgttgctggggaaaatgaggttagggctgtggtcacacggcagcaggggcggaaattggcac

SEQ ID NO: 28027 - DNA, 122 bp, Homo sapiens
  misc_feature (61)..(62): /note="This region represents a CpG dinucleotide"
  misc_feature (61)..(61): /note="Nucleotide may be methylated to form 5-methylcytosine"
tagcggcttcagggcccagccacacccttctccacgtacgtgttccagacccagtcaccccgagcagggagaaccaaccctcataataagaactgtggagattggacctgtggtataagtag

SEQ ID NO: 28028 - DNA, 122 bp, Homo sapiens
  misc_feature (61)..(62): /note="This region represents a CpG dinucleotide"
  misc_feature (61)..(61): /note="Nucleotide may be methylated to form 5-methylcytosine"
cttcatcctcacccacatcccaccggtgtctgaggccctgctgccacttcctactcctgccgtccctgagtcatctggtttaggaagtggcctgaagagcctacaggtcctgggcttttaag

SEQ ID NO: 28029 - DNA, 122 bp, Homo sapiens
  misc_feature (61)..(62): /note="This region represents a CpG dinucleotide"
  misc_feature (61)..(61): /note="Nucleotide may be methylated to form 5-methylcytosine"
gctgccaggtcatttgccaactgagtcaccttatctagctttgcagttgcttcatgcaagcgctcttcatatagagtacagagtttctcagcatttgcctataagttgagaaagaagggctg

SEQ ID NO: 28030 - DNA, 122 bp, Homo sapiens
  misc_feature (61)..(62): /note="This region represents a CpG dinucleotide"
  misc_feature (61)..(61): /note="Nucleotide may be methylated to form 5-methylcytosine"
ggtatgctttgacttgtctcagtcactcagcaaataatttacagagctgagaggagaatgcgggttcacataaaagacattcaaacgaacaggtttgctcactcagggccagaaaggaatca

SEQ ID NO: 28031 - DNA, 122 bp, Homo sapiens
  misc_feature (61)..(62): /note="This region represents a CpG dinucleotide"
  misc_feature (61)..(61): /note="Nucleotide may be methylated to form 5-methylcytosine"
gctgcggaggaaactgcaaatgctgagcctctgaaatacatgattccaaataaaaggtaacgacaccagcagttctgctgatgtaaaggaaacaagaaagacatatgcacgatgctcctaat

SEQ ID NO: 28032 - DNA, 122 bp, Homo sapiens
  misc_feature (61)..(62): /note="This region represents a CpG dinucleotide"
  misc_feature (61)..(61): /note="Nucleotide may be methylated to form 5-methylcytosine"
cttttggaaggaacaggcagagctgcgaggagactctgctgtgttcttccacagaggtggcgcagctgaatcaccagggcttggcccagaaatgtgactgggattccaagcacagcctcttt

SEQ ID NO: 28033 - DNA, 122 bp, Homo sapiens
  misc_feature (61)..(62): /note="This region represents a CpG dinucleotide"
  misc_feature (61)..(61): /note="Nucleotide may be methylated to form 5-methylcytosine"
atcctcagagccctgctccgcaactgtccgtgcccggcgagggccgtgggtcccgagtcgcggcacccactctcgagacgtccgtccgcaccccagaactcgggcccaaggatgcccgtggc

SEQ ID NO: 28034 - DNA, 122 bp, Homo sapiens
  misc_feature (61)..(62): /note="This region represents a CpG dinucleotide"
  misc_feature (61)..(61): /note="Nucleotide may be methylated to form 5-methylcytosine"
tcccattcatagtttcacccgggtggcaagtgaccagaaacaatagcaactgtgcagcttcgtaggtaataattagtcacacacacattgcttggagggtgaaggaaaggtcactttgaaag

SEQ ID NO: 28035 - DNA, 122 bp, Homo sapiens
  misc_feature (61)..(62): /note="This region represents a CpG dinucleotide"
  misc_feature (61)..(61): /note="Nucleotide may be methylated to form 5-methylcytosine"
ccatcagatttcacaacccctcatcaaggagtcactttggacccgagaaaagcaagtgcccgcgtcagcagaaaaggaacgaggagcgaggccgccagatcgacgggaaacaggcggagaga

SEQ ID NO: 28036 - DNA, 122 bp, Homo sapiens
  misc_feature (61)..(62): /note="This region represents a CpG dinucleotide"
  misc_feature (61)..(61): /note="Nucleotide may be methylated to form 5-methylcytosine"
caagtggcttatgttttgcacgcattggaaagaagggaaaacaaaagctgtcttagaagacgaaatcaatcacatgaggagtggcactgctccagagagctgaggtcttcctcttaggaatt

SEQ ID NO: 28037 - DNA, 122 bp, Homo sapiens
  misc_feature (61)..(62): /note="This region represents a CpG dinucleotide"
  misc_feature (61)..(61): /note="Nucleotide may be methylated to form 5-methylcytosine"
ccttctaatgaaagtaacacacagcacaggagggcggccctgggcgcggggctgcgtccccgagaaatgcttgttactgtggaatgagggacagagcaaatcccctgaatcgggcagagctg

SEQ ID NO: 28038 - DNA, 122 bp, Homo sapiens
  misc_feature (61)..(62): /note="This region represents a CpG dinucleotide"
  misc_feature (61)..(61): /note="Nucleotide may be methylated to form 5-methylcytosine"
ttctgggaggtcaaggcttgttctggccagcctcacaggtaattccagtggctggatacccgcattgtggggccttaccttgcacagctgctgccttcaaggagcttataagtgagggtctg

SEQ ID NO: 28039 - DNA, 122 bp, Homo sapiens
  misc_feature (61)..(62): /note="This region represents a CpG dinucleotide"
  misc_feature (61)..(61): /note="Nucleotide may be methylated to form 5-methylcytosine"
caagatcaggctctgccatttaccagctatgtggcctcaggcaggttgaactctttgagccgcagttatctcatctgtaaattggggataataacacttaatggtacttatctcatggggtt

SEQ ID NO: 28040 - DNA, 122 bp, Homo sapiens
  misc_feature (61)..(62): /note="This region represents a CpG dinucleotide"
  misc_feature (61)..(61): /note="Nucleotide may be methylated to form 5-methylcytosine"
atggttattcccataataataatgtgtgtatcatgcataatgcactgcacctcttcaccacgctggtgcccactcttctgctccccctgccggattcctcagccccttctaccctgatggtt

SEQ ID NO: 28041 - DNA, 122 bp, Homo sapiens
  misc_feature (61)..(62): /note="This region represents a CpG dinucleotide"
  misc_feature (61)..(61): /note="Nucleotide may be methylated to form 5-methylcytosine"
aaaaaccttcagcagaaatagctatatcaaaggaggagatataaaattaatgtaaacaaacgagcgatttgagaaaacagacttaaaagaaatatctacaatgagtcacaagacagtcaaca

SEQ ID NO: 28042 - DNA, 122 bp, Homo sapiens
  misc_feature (61)..(62): /note="This region represents a CpG dinucleotide"
  misc_feature (61)..(61): /note="Nucleotide may be methylated to form 5-methylcytosine"
gggcaacccggtgcaaatcacttaacctctctgagctttctcctcttctaaaaaatgaaacgataacattatgcatactgtaggatggctgtaaagaggaagttagctaaattatgtgaaat

SEQ ID NO: 28043 - DNA, 122 bp, Homo sapiens
  misc_feature (61)..(62): /note="This region represents a CpG dinucleotide"
  misc_feature (61)..(61): /note="Nucleotide may be methylated to form 5-methylcytosine"
cacatacatttcacctgtgtcttataagctactacatagtcattatctatacttaacacacgtttatgagtttcatccatcttctttttcttgttcatctgtagcagaattgactgttgtca

SEQ ID NO: 28044 - DNA, 122 bp, Homo sapiens
  misc_feature (61)..(62): /note="This region represents a CpG dinucleotide"
  misc_feature (61)..(61): /note="Nucleotide may be methylated to form 5-methylcytosine"
tcagcatccctccaggctgtaactcctggaaacctcaggtggagattcctggcagcagtgcgtggcctgaagatctctgcagggtaatttctacagtctctgtcactgactatgacagtgca

SEQ ID NO: 28045 - DNA, 122 bp, Homo sapiens
  misc_feature (61)..(62): /note="This region represents a CpG dinucleotide"
  misc_feature (61)..(61): /note="Nucleotide may be methylated to form 5-methylcytosine"
aggcaaaagggaagcaagttgaggagatcccttttcactccactagctggctgctaatctcggcacgcaggtcagattgaactggagctgggacatggtctgaggatgcttggcttaacctc

SEQ ID NO: 28046 - DNA, 122 bp, Homo sapiens
  misc_feature (61)..(62): /note="This region represents a CpG dinucleotide"
  misc_feature (61)..(61): /note="Nucleotide may be methylated to form 5-methylcytosine"
gtatctggcaaagggctgtcccaggatggaagggcagaaggtggaagcaaatgagagacacgaaattgggccaaatgtcgtccatccatcaggagccactcccatgataacagtatttatct

SEQ ID NO: 28047 - DNA, 122 bp, Homo sapiens
  misc_feature (61)..(62): /note="This region represents a CpG dinucleotide"
  misc_feature (61)..(61): /note="Nucleotide may be methylated to form 5-methylcytosine"
cctagtgacacgataaacactcaatcctcacggtgcactaactcatagatgatttattgccgtaagtaactaaacaagagaagagacaggctgtgggtttggtcaagacaatcagcattccc

SEQ ID NO: 28048 - DNA, 122 bp, Homo sapiens
  misc_feature (61)..(62): /note="This region represents a CpG dinucleotide"
  misc_feature (61)..(61): /note="Nucleotide may be methylated to form 5-methylcytosine"
ggcttcagcctccaaggaggtatagcagtggccaggtctcatcctgtgctagtccagggccgtgctcaggaatcacatttgttaccgtgctgtgagtctagggagagggccagagggcacca

SEQ ID NO: 28049 - DNA, 122 bp, Homo sapiens
  misc_feature (61)..(62): /note="This region represents a CpG dinucleotide"
  misc_feature (61)..(61): /note="Nucleotide may be methylated to form 5-methylcytosine"
gtctgtgtggaatgggcagcaagttataaggaatagtttcattactcctctcggctatatcggaaaccaaattaccaagtgaattctccacccagtaggaaagaagagactgtctgtcttac

SEQ ID NO: 28050 - DNA, 122 bp, Homo sapiens
  misc_feature (61)..(62): /note="This region represents a CpG dinucleotide"
  misc_feature (61)..(61): /note="Nucleotide may be methylated to form 5-methylcytosine"
tgagccctcatcctgcaggcagagcccctcagtgctctgagaaacctgccctgaactcaccgcctcccctgcctgggcactccctcctccctgcgcccacagcccccatgccaatctccgtc

SEQ ID NO: 28051 - DNA, 122 bp, Homo sapiens
  misc_feature (61)..(62): /note="This region represents a CpG dinucleotide"
  misc_feature (61)..(61): /note="Nucleotide may be methylated to form 5-methylcytosine"
tcactcctgaggtgcctgccagtctgtacactgggcaccatggagtccttggcatgtttgcgtttcctgaactgggctcccagccacagcattgcattatcctcatgcaaaccaggtaattt

SEQ ID NO: 28052 - DNA, 122 bp, Homo sapiens
  misc_feature (61)..(62): /note="This region represents a CpG dinucleotide"
  misc_feature (61)..(61): /note="Nucleotide may be methylated to form 5-methylcytosine"
gcctgcctcaaccactgtccacctgcacatctgagaggctggcaggtcaccggggctagccgtgcacgtcagttcctgggaagaaagtagaatgtgaatcatcttctctcaaacgcctatca

SEQ ID NO: 28053 - DNA, 122 bp, Homo sapiens
  misc_feature (61)..(62): /note="This region represents a CpG dinucleotide"
  misc_feature (61)..(61): /note="Nucleotide may be methylated to form 5-methylcytosine"
ccatgacaagggtgcagctgtgcttgctctcgaaggcgtcatagagctggatcaggttcacgtggctgagctggttcatgatgttgatctcgttcttcacgtcctccttgggggaaccagag

SEQ ID NO: 28054 - DNA, 122 bp, Homo sapiens
  misc_feature (61)..(62): /note="This region represents a CpG dinucleotide"
  misc_feature (61)..(61): /note="Nucleotide may be methylated to form 5-methylcytosine"
gcggcttgccagcattttctcgggctgcagaggctggaggcttatggacgactccgtggtcgcctcccccggggttacgatatttggagaaggtttttcctccttgatcattttgggcaaca

SEQ ID NO: 28055 - DNA, 122 bp, Homo sapiens
  misc_feature (61)..(62): /note="This region represents a CpG dinucleotide"
  misc_feature (61)..(61): /note="Nucleotide may be methylated to form 5-methylcytosine"
tctgtctgccttccatctccactcaaaagaaacatgctcctggccaggtgcggtggcttacgcctgtaatcccaacacttcagaaggccaaagcgggtggatcacctgaagtcaggagttca

SEQ ID NO: 28056 - DNA, 122 bp, Homo sapiens
  misc_feature (61)..(62): /note="This region represents a CpG dinucleotide"
  misc_feature (61)..(61): /note="Nucleotide may be methylated to form 5-methylcytosine"
acccagtggactcattgtgagcagactctgaacagactcatggacatgactcatggcctccgtatgctttcatttcgaaaggagagtcatgatgtttcttcagatctttaggtatcagtgtt

SEQ ID NO: 28057 - DNA, 122 bp, Homo sapiens
  misc_feature (61)..(62): /note="This region represents a CpG dinucleotide"
  misc_feature (61)..(61): /note="Nucleotide may be methylated to form 5-methylcytosine"
tatttattctcccctagatcaatcaagtgtcactatggcatgcctgggtccatcaagtgtcgttatttgtcccagaaaaagttacttcctccttcctgagacctagctgagttgtcaccttc

SEQ ID NO: 28058 - DNA, 122 bp, Homo sapiens
  misc_feature (61)..(62): /note="This region represents a CpG dinucleotide"
  misc_feature (61)..(61): /note="Nucleotide may be methylated to form 5-methylcytosine"
tgagtgaaacagagcagtccttctattccctgccctttgccatttttgtcataaatgaaacgtaggcaggtatagaaactcacgtagacttggttaaccacttcctctgtgaaaataactct

SEQ ID NO: 28059 - DNA, 122 bp, Homo sapiens
  misc_feature (61)..(62): /note="This region represents a CpG dinucleotide"
  misc_feature (61)..(61): /note="Nucleotide may be methylated to form 5-methylcytosine"
gcgcttgcagcatgaggagaaaatgaaatcttgatactacagttttgtaagatattgaagcgaagttcccatgtcttaaataaaacagcaaaatgtgaaagactcaaagctgttgttacaag

SEQ ID NO: 28060 - DNA, 122 bp, Homo sapiens
  misc_feature (61)..(62): /note="This region represents a CpG dinucleotide"
  misc_feature (61)..(61): /note="Nucleotide may be methylated to form 5-methylcytosine"
ctcaggtgatccacccgcctccacctcccaaagggctgggattacaggtgtgagccaccgcgccaggccaagttctgttaaacttttagtaaggctgaaggcttaggcatgttttgaccatt

SEQ ID NO: 28061 - DNA, 122 bp, Homo sapiens
  misc_feature (61)..(62): /note="This region represents a CpG dinucleotide"
  misc_feature (61)..(61): /note="Nucleotide may be methylated to form 5-methylcytosine"
ccacttccttgggtatcctggtagtctctagaaacacctgggtgagctcactgccagcagcggctaccttgttacacctgttctggcagaggctcaatcatgagcagcaagggccagaccca

SEQ ID NO: 28062 - DNA, 122 bp, Homo sapiens
  misc_feature (61)..(62): /note="This region represents a CpG dinucleotide"
  misc_feature (61)..(61): /note="Nucleotide may be methylated to form 5-methylcytosine"
gcctgaagcagcaggatgatgattcacagggtgaggcacatagtcctcatggctctcctccgcttcccacatgtcactgcaccatcgcctcacacagcagtcaccatagctcttgtaatttc

SEQ ID NO: 28063 - DNA, 122 bp, Homo sapiens
  misc_feature (61)..(62): /note="This region represents a CpG dinucleotide"
  misc_feature (61)..(61): /note="Nucleotide may be methylated to form 5-methylcytosine"
caaccaccagcatgcccggcaaagagctggtgtgtacagtggttggctagtgccagctctcgtgtttaaacttccgagttccagaccttgccctgcgtgttgctagctgtgtgaccttgggt

SEQ ID NO: 28064 - DNA, 122 bp, Homo sapiens
  misc_feature (61)..(62): /note="This region represents a CpG dinucleotide"
  misc_feature (61)..(61): /note="Nucleotide may be methylated to form 5-methylcytosine"
gcaagggtttcctggggtccactgtgctccaggccccatgctgggactgcttggcatccccgcttcctgcgtgctccctttctggggctccaagtttggcagagacccaggttgcagaaggg

SEQ ID NO: 28065 - DNA, 122 bp, Homo sapiens
  misc_feature (61)..(62): /note="This region represents a CpG dinucleotide"
  misc_feature (61)..(61): /note="Nucleotide may be methylated to form 5-methylcytosine"
acttcaataagaacagaaataaagctgtttttcacttccttttcaaactccagttcatctcgtaaagccaactgctgcaccagctcctcagagtactccttaatggcagtctcaatttcttc

SEQ ID NO: 28066 - DNA, 122 bp, Homo sapiens
  misc_feature (61)..(62): /note="This region represents a CpG dinucleotide"
  misc_feature (61)..(61): /note="Nucleotide may be methylated to form 5-methylcytosine"
tcctttattatgccctaaatacacagagtagattaagcacaatcctttgtcatcatacgtcgtcatcattggtccataaatgacctttttctctctctccctgttgctctttcagcatgtac

SEQ ID NO: 28067 - DNA, 122 bp, Homo sapiens
  misc_feature (61)..(62): /note="This region represents a CpG dinucleotide"
  misc_feature (61)..(61): /note="Nucleotide may be methylated to form 5-methylcytosine"
tttactcaagtcacagctggccacttcttatgcttatggtctattcttaaatctggactccgttaagaaggatatagaaagatttttacacttgtagaaataaaggaagatatttcagcatg

SEQ ID NO: 28068 - DNA, 122 bp, Homo sapiens
  misc_feature (61)..(62): /note="This region represents a CpG dinucleotide"
  misc_feature (61)..(61): /note="Nucleotide may be methylated to form 5-methylcytosine"
aaaatgtgcataaatcataagtgcccagctgggtgaattgccacaaagtgaacatacctgcgcaaccagtccccaaatcaaaaaagagagccaccaccagtatcctagaggtcgtggttccc

SEQ ID NO: 28069 - DNA, 122 bp, Homo sapiens
  misc_feature (61)..(62): /note="This region represents a CpG dinucleotide"
  misc_feature (61)..(61): /note="Nucleotide may be methylated to form 5-methylcytosine"
cctggttcagggaggaacatgatgtgcttggtttgggatgcatcacactggaaacgcccacggaacctcaggagcagatgacagggagaggtcacaactgagatctcaatgttggtcaaagc

SEQ ID NO: 28070 - DNA, 122 bp, Homo sapiens
  misc_feature (61)..(62): /note="This region represents a CpG dinucleotide"
  misc_feature (61)..(61): /note="Nucleotide may be methylated to form 5-methylcytosine"
aggctgtgtgcacagggcatgccgcaggtgggttctcaatgagccgctccacatgggatgcgaggcttctggccaagagcacgtctattaacagcacttttggggacatctaacagactctc

SEQ ID NO: 28071 - DNA, 122 bp, Homo sapiens
  misc_feature (61)..(62): /note="This region represents a CpG dinucleotide"
  misc_feature (61)..(61): /note="Nucleotide may be methylated to form 5-methylcytosine"
cttaagccctagaagtctaggcagtaatgagctgtgaccatgccactgaactccagcctacgtgacagagactctgtctcaaaaaagaaaaaaaaaaagtcatatcaccaatgagatctgac

SEQ ID NO: 28072 - DNA, 122 bp, Homo sapiens
  misc_feature (61)..(62): /note="This region represents a CpG dinucleotide"
  misc_feature (61)..(61): /note="Nucleotide may be methylated to form 5-methylcytosine"
tcaccattaaagtcaggcaataggacccttgcctgggttccctttttgagaaaggtgctccgtctctcctttgactgtgccctaaaccacattatgaggaagctgaagggccaaggagatgc

SEQ ID NO: 28073 - DNA, 122 bp, Homo sapiens
  misc_feature (61)..(62): /note="This region represents a CpG dinucleotide"
  misc_feature (61)..(61): /note="Nucleotide may be methylated to form 5-methylcytosine"
aggcagtagaaacggcagtactgccacagctggacactcccagcctcccaagcacctacacgtaagtgcctgaggaagtcagtcagtcaagcccaaagggccacaggctttgcagcaggact

SEQ ID NO: 28074 - DNA, 122 bp, Homo sapiens
  misc_feature (61)..(62): /note="This region represents a CpG dinucleotide"
  misc_feature (61)..(61): /note="Nucleotide may be methylated to form 5-methylcytosine"
actcgaaaaacaagggccaattaactgaaagtaatccaggactacctccctgaaaagctgcgctctagtcaggagtaggccgaagcggccttctgacacagcatgactcagcaggtttggag

SEQ ID NO: 28075 - DNA, 122 bp, Homo sapiens
  misc_feature (61)..(62): /note="This region represents a CpG dinucleotide"
  misc_feature (61)..(61): /note="Nucleotide may be methylated to form 5-methylcytosine"
gactcagaatgcagccacgtagataaccgctgactcagttataaattccttagctccctccgcaggcctgggtttgagggacaggtgactcacagactgaccctctctttggtctggttttt

SEQ ID NO: 28076 - DNA, 122 bp, Homo sapiens
  misc_feature (61)..(62): /note="This region represents a CpG dinucleotide"
  misc_feature (61)..(61): /note="Nucleotide may be methylated to form 5-methylcytosine"
ataaactgtaaaaaagttcacaataatatgtatgatgaactttccagtaaacttaaagcacgtcacacatgtttttttctctcattcacctctttcacttcttcccacaatttctacgtcaa

SEQ ID NO: 28077 - DNA, 122 bp, Homo sapiens
  misc_feature (61)..(62): /note="This region represents a CpG dinucleotide"
  misc_feature (61)..(61): /note="Nucleotide may be methylated to form 5-methylcytosine"
agactcccagagacccaaacgcctccctctctattttctcaagaagagggaactgaggcccggagggacattgcgtctcaccccaggtcacagggcaaggcagttgcagaaccggactgcga

SEQ ID NO: 28078 - DNA, 122 bp, Homo sapiens
  misc_feature (61)..(62): /note="This region represents a CpG dinucleotide"
  misc_feature (61)..(61): /note="Nucleotide may be methylated to form 5-methylcytosine"
ccaggctctggtcatgtgggtgacttcacattcctgttggttactggggacagccagctgcgggcaggcggggcccagctctgctccgtgcggaggctgtgttctgccctctccctgcccac

SEQ ID NO: 28079 - DNA, 122 bp, Homo sapiens
  misc_feature (61)..(62): /note="This region represents a CpG dinucleotide"
  misc_feature (61)..(61): /note="Nucleotide may be methylated to form 5-methylcytosine"
ggtgctgcgggaggtgagctgggctggtggggacaggggcagggcttggggctgggtctccggacagaggcctggcttttctgtcagggcagggcctagcccctgcccccataaaagaggag

SEQ ID NO: 28080 - DNA, 122 bp, Homo sapiens
  misc_feature (61)..(62): /note="This region represents a CpG dinucleotide"
  misc_feature (61)..(61): /note="Nucleotide may be methylated to form 5-methylcytosine"
caccaaatgcattttgtggtcttactgtttgcttttgctggaccgtatgtcttttcaccccgctctgttgtaccttatgatgaggggcaaataaccacaaagcaggaaaccttgtcaaggaa

SEQ ID NO: 28081 - DNA, 122 bp, Homo sapiens
  misc_feature (61)..(62): /note="This region represents a CpG dinucleotide"
  misc_feature (61)..(61): /note="Nucleotide may be methylated to form 5-methylcytosine"
ttatgtgacagtgagacagacaaagttattttagttcttcaggatgatgtcaaaatgacacgctgcccttataatgagactcagtattttgtactgtcatggcaggtggcaggttcacttac

SEQ ID NO: 28082 - DNA, 122 bp, Homo sapiens
  misc_feature (61)..(62): /note="This region represents a CpG dinucleotide"
  misc_feature (61)..(61): /note="Nucleotide may be methylated to form 5-methylcytosine"
gcccacgggtcgtcgggtggcctgcgcggggaaagcaagtcgccgtgcaggtccctagggcggtgttcgccccgcggctggagctgcaggccgggcggaggcgggaggtcgcccggggagaa

SEQ ID NO: 28083 - DNA, 122 bp, Homo sapiens
  misc_feature (61)..(62): /note="This region represents a CpG dinucleotide"
  misc_feature (61)..(61): /note="Nucleotide may be methylated to form 5-methylcytosine"
gtatcctgcctattgcctgactatcatctacagctgggagctctgtgtgattaaaggccacgtagtgcaatccccgtctgaggctaacacatacctacactcacacatcaactgcagtagac

SEQ ID NO: 28084 - DNA, 122 bp, Homo sapiens
  misc_feature (61)..(62): /note="This region represents a CpG dinucleotide"
  misc_feature (61)..(61): /note="Nucleotide may be methylated to form 5-methylcytosine"
tgataagattataaaagatttctctcgaattctcaacttttggtgaggcctctactctctcgccaaacagctgagtttttaatggattgtgtctcaagacaatcaaattggcacctttgaca

SEQ ID NO: 28085 - DNA, 122 bp, Homo sapiens
  misc_feature (61)..(62): /note="This region represents a CpG dinucleotide"
  misc_feature (61)..(61): /note="Nucleotide may be methylated to form 5-methylcytosine"
cagcacattttgatgagtgcctttcatatgccagtccctgttccaggagctggggtttatcgtggtaaataaaaccgacagaaactttgtcctcttggacaaagcttatgttctggtagggg

SEQ ID NO: 28086 - DNA, 122 bp, Homo sapiens
  misc_feature (61)..(62): /note="This region represents a CpG dinucleotide"
  misc_feature (61)..(61): /note="Nucleotide may be methylated to form 5-methylcytosine"
tagtattctttatctcataagtaagattgtccccatttcacagatgaaggctcagagtgtcgtgaaagttagagcacccaagttgcacgactggcgagtccagagccggctctgtgtgctgt

SEQ ID NO: 28087 - DNA, 122 bp, Homo sapiens
  misc_feature (61)..(62): /note="This region represents a CpG dinucleotide"
  misc_feature (61)..(61): /note="Nucleotide may be methylated to form 5-methylcytosine"
agtcagagatgggggcttgcagatttaattggaaatagttcttgaaattgagtgagtgtacgtacatgcatgtgtgagcgtctattgactgttatgtccttcaagcatgaattaattagcac

SEQ ID NO: 28088 - DNA, 122 bp, Homo sapiens
  misc_feature (61)..(62): /note="This region represents a CpG dinucleotide"
  misc_feature (61)..(61): /note="Nucleotide may be methylated to form 5-methylcytosine"
gatgtacagttctgattataaatcacttccctaaaagtactctgtgttctcaaaaggctccgtccgaaagtgaacacgtgcttcagtttgttatgactgagctactgattgtgcaacacact

SEQ ID NO: 28089 - DNA, 122 bp, Homo sapiens
  misc_feature (61)..(62): /note="This region represents a CpG dinucleotide"
  misc_feature (61)..(61): /note="Nucleotide may be methylated to form 5-methylcytosine"
caagagcaagagagaggactcaccagagacagtaatagcaaaacagaaggcacagtctttcgtaatccaatcacagatgtgacatcccatcactgttgccacatcctgtgagttagaagtaa

SEQ ID NO: 28090 - DNA, 122 bp, Homo sapiens
  misc_feature (61)..(62): /note="This region represents a CpG dinucleotide"
  misc_feature (61)..(61): /note="Nucleotide may be methylated to form 5-methylcytosine"
tttgcatttccctaatgacagaacatgtggagtatctttttatctgtttatttgccatcacgtatttccttctgccattacagaaattgggctgtttgttttcttattgaattttgagtttt

SEQ ID NO: 28091 - DNA, 122 bp, Homo sapiens
  misc_feature (61)..(62): /note="This region represents a CpG dinucleotide"
  misc_feature (61)..(61): /note="Nucleotide may be methylated to form 5-methylcytosine"
catcctgtggtaaatcaccgctcttgcatattcagaagtcgtcagtttcataagcagaagcgtgactctgttgggcaactggaggtggtaactcagtggctctgattaggtggcagtgatag

SEQ ID NO: 28092 - DNA, 122 bp, Homo sapiens
  misc_feature (61)..(62): /note="This region represents a CpG dinucleotide"
  misc_feature (61)..(61): /note="Nucleotide may be methylated to form 5-methylcytosine"
gaaaccgcggggctaggctggcaatgccttatagctgagcctgctgcaggggagcagggtcggggtgctccacagtgagccaggacaggttctcctggctcccctttgtctgtgtcacctca

SEQ ID NO: 28093 - DNA, 122 bp, Homo sapiens
  misc_feature (61)..(62): /note="This region represents a CpG dinucleotide"
  misc_feature (61)..(61): /note="Nucleotide may be methylated to form 5-methylcytosine"
caagttttaggtggatgaactcttagaacagtgccagaataaaaggctacctgtatttcacgaagattcgtgacaaaaagttaagagcattgtgcaatatgctggtaatgatcaaatgggca

SEQ ID NO: 28094 - DNA, 122 bp, Homo sapiens
  misc_feature (61)..(62): /note="This region represents a CpG dinucleotide"
  misc_feature (61)..(61): /note="Nucleotide may be methylated to form 5-methylcytosine"
gacgcttgagctggagaaagaattcctcttcaacatgtacctcacccgggaccggcgctacgaggtggccaggattctcaacctaacagagagacaggtcaaaatctggtttcagaaccgta

SEQ ID NO: 28095 - DNA, 122 bp, Homo sapiens
  misc_feature (61)..(62): /note="This region represents a CpG dinucleotide"
  misc_feature (61)..(61): /note="Nucleotide may be methylated to form 5-methylcytosine"
agttgcaaagcaggtaggcctagtacacaatccagtttcaacagtcaaccagtcaacccacgtttcccataatgcagaagtgcataatggcctacctaatgtaaataagtctgagcaattag

SEQ ID NO: 28096 - DNA, 122 bp, Homo sapiens
  misc_feature (61)..(62): /note="This region represents a CpG dinucleotide"
  misc_feature (61)..(61): /note="Nucleotide may be methylated to form 5-methylcytosine"
actgagctaaagctagaagcatagtgcccaggtgccactgtacacccagaggacagagcacgtttcttttccttgggaactgtcagatagcaaccataggtggcaatgcaagctcagcagta

SEQ ID NO: 28097 - DNA, 122 bp, Homo sapiens
  misc_feature (61)..(62): /note="This region represents a CpG dinucleotide"
  misc_feature (61)..(61): /note="Nucleotide may be methylated to form 5-methylcytosine"
ctctgcaaaatatcgtgtgctcacttatgtgtcttcttttgactaaaatgaaagctttgtcgatctgccttgtacatctgccttgctcacagctgtatccctagggctcagctgtccgggtg

SEQ ID NO: 28098 - DNA, 122 bp, Homo sapiens
  misc_feature (61)..(62): /note="This region represents a CpG dinucleotide"
  misc_feature (61)..(61): /note="Nucleotide may be methylated to form 5-methylcytosine"
tgaagttcagagtgtacatgatttgctcagggcaagaggcagagcttgtgctcaaactcacgccttgtaatacgagttatatgctcttttgctagccacttacatcagcagtactccagcct

SEQ ID NO: 28099 - DNA, 122 bp, Homo sapiens
  misc_feature (61)..(62): /note="This region represents a CpG dinucleotide"
  misc_feature (61)..(61): /note="Nucleotide may be methylated to form 5-methylcytosine"
ttggtttaccctccctctccatcgagcaggcggcggtaggtctcgatctccacctccaggcgtgtcttgatgtccagcaattgcttgtactctgcgttctggcatttagtctcaccccagat

SEQ ID NO: 28100 - DNA, 122 bp, Homo sapiens
  misc_feature (61)..(62): /note="This region represents a CpG dinucleotide"
  misc_feature (61)..(61): /note="Nucleotide may be methylated to form 5-methylcytosine"
ccagcatgattgcttgtgtactatctgcatcccccaccagaacacaagctccatctgagacggggattcattgcatcatatgtcagcggaatagagaaaacacatgctcacacctcctaact

SEQ ID NO: 28101 - DNA, 122 bp, Homo sapiens
  misc_feature (61)..(62): /note="This region represents a CpG dinucleotide"
  misc_feature (61)..(61): /note="Nucleotide may be methylated to form 5-methylcytosine"
ggtataaactgttactccattctctattacatatctgattaaatgtttctgccctgtcttcgtgatctgtgcatataaatccatgtcagtgtctttattaagaatatgtttatggcagggac

SEQ ID NO: 28102 - DNA, 122 bp, Homo sapiens
  misc_feature (61)..(62): /note="This region represents a CpG dinucleotide"
  misc_feature (61)..(61): /note="Nucleotide may be methylated to form 5-methylcytosine"
tcggttcctcaaaagacacaaaaggtgcaaaaatagcttctgcaattgaagcaagaaccacgtcagtaaccagatgaatgtgggtggtcacataagattctggtgctgcaaagggcaaatta

SEQ ID NO: 28103 - DNA, 122 bp, Homo sapiens
  misc_feature (61)..(62): /note="This region represents a CpG dinucleotide"
  misc_feature (61)..(61): /note="Nucleotide may be methylated to form 5-methylcytosine"
cagagacatttcataataacaacaatgatgttgaaacacttcctatgcttcaaagcactgcgctaagtacttagtgtgcattagtagccactcaaaccccatgaatgtgggggtattcctgt

SEQ ID NO: 28104 - DNA, 122 bp, Homo sapiens
  misc_feature (61)..(62): /note="This region represents a CpG dinucleotide"
  misc_feature (61)..(61): /note="Nucleotide may be methylated to form 5-methylcytosine"
actccgggttgctttgcccatcggcggcagggccggacctcagggctctcctgacactggcgtgttccagtcctggctgcatctgagaatcacctggaaactttaaaaacgcgggtgcacgg

SEQ ID NO: 28105 - DNA, 122 bp, Homo sapiens
  misc_feature (61)..(62): /note="This region represents a CpG dinucleotide"
  misc_feature (61)..(61): /note="Nucleotide may be methylated to form 5-methylcytosine"
cacattcagtcctgttcatcttcaaaacaggcatttcctcattcacacaagcttgtacatcgcattaactcatttctgaaaggagcaagacgtaaagtagatggcgagagacaatgctgttt

SEQ ID NO: 28106 - DNA, 122 bp, Homo sapiens
  misc_feature (61)..(62): /note="This region represents a CpG dinucleotide"
  misc_feature (61)..(61): /note="Nucleotide may be methylated to form 5-methylcytosine"
tgtatgaccttggatgagtcacctctcagaacctcacgtactcatctgtaaatgggtcatcgtgagtatgcctttgtcatgggaggttaccagagttaaaggggaaaatggaaagctctttg

SEQ ID NO: 28107 - DNA, 122 bp, Homo sapiens
  misc_feature (61)..(62): /note="This region represents a CpG dinucleotide"
  misc_feature (61)..(61): /note="Nucleotide may be methylated to form 5-methylcytosine"
ggcaacaaagttcatgatcaaagtaatgtcagctaagaattttgctagctaggcacagaacgcataggaaagatgaggtcaaggcaagtttcttagaagccatgaaggctgagctgaatttg

SEQ ID NO: 28108 - DNA, 122 bp, Homo sapiens
  misc_feature (61)..(62): /note="This region represents a CpG dinucleotide"
  misc_feature (61)..(61): /note="Nucleotide may be methylated to form 5-methylcytosine"
tggatacactccagcccaccacctgctagctgttgacctgtggcaaattgcttaaccactcggttttactgaagtgccttgagagcaatgcctgacacatagaaagtgttagctagtctgtt

SEQ ID NO: 28109 - DNA, 122 bp, Homo sapiens
  misc_feature (61)..(62): /note="This region represents a CpG dinucleotide"
  misc_feature (61)..(61): /note="Nucleotide may be methylated to form 5-methylcytosine"
aaaagctgggtgtagatgggtcatttattctttgtctaaggattaatcagtccttgttctcgctaatggctctgccatttttctgtgtgttaatccaggaggaattttgttgtcagagaata

SEQ ID NO: 28110 - DNA, 122 bp, Homo sapiens
  misc_feature (61)..(62): /note="This region represents a CpG dinucleotide"
  misc_feature (61)..(61): /note="Nucleotide may be methylated to form 5-methylcytosine"
tttctcatttagagaattcaattcctagttcccaactgttatatctgtttctgatatccccgtgagtcattctgtctcagccttgctcaccagaggacttagaattccctccccgttaggtt

SEQ ID NO: 28111 - DNA, 122 bp, Homo sapiens
  misc_feature (61)..(62): /note="This region represents a CpG dinucleotide"
  misc_feature (61)..(61): /note="Nucleotide may be methylated to form 5-methylcytosine"
acagccaccaccctcgcctcgatgctcactgtggtttcctgcttttcctgcccccatctccgcccacccttgtgatctacagtagctcatacagtagcctgggtgaccttgttaagggctga

SEQ ID NO: 28112 - DNA, 122 bp, Homo sapiens
  misc_feature (61)..(62): /note="This region represents a CpG dinucleotide"
  misc_feature (61)..(61): /note="Nucleotide may be methylated to form 5-methylcytosine"
cactgagtcacacttctgagtcttaagactattacacattagtgaggattttaaagtattcgtgtggtacagaagtaattactgtcaatggcaaaaaccacaactacttttgcaccactcta

SEQ ID NO: 28113 - DNA, 122 bp, Homo sapiens
  misc_feature (61)..(62): /note="This region represents a CpG dinucleotide"
  misc_feature (61)..(61): /note="Nucleotide may be methylated to form 5-methylcytosine"
aaaatcaaaacagcacagtagaagggccccgggatgcggctgggcttacgcacctggtcgcgcagctctccctgaggtggtttgctcggctcctccagccggggctccctgcgtgagcatga

SEQ ID NO: 28114 - DNA, 122 bp, Homo sapiens
  misc_feature (61)..(62): /note="This region represents a CpG dinucleotide"
  misc_feature (61)..(61): /note="Nucleotide may be methylated to form 5-methylcytosine"
acaaatgatcacccatcaataagaacctgaaaacctggcacctacagagatcgaaataaccgtccccagaagcccgatacacaatcataactcaagcagcagtggggatccacaatgctcac

SEQ ID NO: 28115 - DNA, 122 bp, Homo sapiens
  misc_feature (61)..(62): /note="This region represents a CpG dinucleotide"
  misc_feature (61)..(61): /note="Nucleotide may be methylated to form 5-methylcytosine"
taaataatccatggattaccaacttctcagcaatggtgtaaattcttctgctaaataacccgtgggttaaagaggacatcacattggaaattccagagtacttaaagttaagtgtatcttct

SEQ ID NO: 28116 - DNA, 122 bp, Homo sapiens
  misc_feature (61)..(62): /note="This region represents a CpG dinucleotide"
  misc_feature (61)..(61): /note="Nucleotide may be methylated to form 5-methylcytosine"
atcactaatttagcctgtttggcaaacactgcagctgatttcagtattactttttctccccgctccttgggaaaaaagcaacaccagaatagaacttgcaagcttcctttggactcataccc

SEQ ID NO: 28117 - DNA, 122 bp, Homo sapiens
  misc_feature (61)..(62): /note="This region represents a CpG dinucleotide"
  misc_feature (61)..(61): /note="Nucleotide may be methylated to form 5-methylcytosine"
cccatttttctttgaacattttcttgctttctggcaccagaggatgttccaggctcatctcgtaacttccctgttttagttatggagtcagttacttctccaagaaggcttggttgttttca

SEQ ID NO: 28118 - DNA, 122 bp, Homo sapiens
  misc_feature (61)..(62): /note="This region represents a CpG dinucleotide"
  misc_feature (61)..(61): /note="Nucleotide may be methylated to form 5-methylcytosine"
ggccagctggctctgtcttaacattaagtactcagttcaaacgtcacctactcagagtggcgcttcctgatcaggcagtctagagtaactatctaggtgctctattacattatcacaatatc

SEQ ID NO: 28119 - DNA, 122 bp, Homo sapiens
  misc_feature (61)..(62): /note="This region represents a CpG dinucleotide"
  misc_feature (61)..(61): /note="Nucleotide may be methylated to form 5-methylcytosine"
cagagaagtaaaggtctcctatgacatctggaattcagatctccagtaaaaaccaaaatgcggtagctcaattttaggacttgtgaacccaggacattgctggtgacttcacccgaggcttt

SEQ ID NO: 28120 - DNA, 122 bp, Homo sapiens
  misc_feature (61)..(62): /note="This region represents a CpG dinucleotide"
  misc_feature (61)..(61): /note="Nucleotide may be methylated to form 5-methylcytosine"
atttcctgggaacgtgaatggaatgagcagcagggtgacatttactcaaaggctgggtgacgagtgtcagtaagtgaactacaaatgggaaggttacagaaaaatacttcaaagaatgaagt

SEQ ID NO: 28121 - DNA, 122 bp, Homo sapiens
  misc_feature (61)..(62): /note="This region represents a CpG dinucleotide"
  misc_feature (61)..(61): /note="Nucleotide may be methylated to form 5-methylcytosine"
aggagtgctgtgtctgtgcaaaatggcagggcgtgcagaccctgtttcttcctgccctcgcgctcagctaagggtagacaccatatcgtgcatcaccttgggtgtgctatttgccttgagtt

SEQ ID NO: 28122 - DNA, 122 bp, Homo sapiens
  misc_feature (61)..(62): /note="This region represents a CpG dinucleotide"
  misc_feature (61)..(61): /note="Nucleotide may be methylated to form 5-methylcytosine"
gttgaatgaataaacttccattaaaggatatcctttgttttagtctctctaaggctctaccggatgactgaaacactaaactcaaggtattttgtaaataagcaacaatggcctaatgagtc

SEQ ID NO: 28123 - DNA, 122 bp, Homo sapiens
  misc_feature (61)..(62): /note="This region represents a CpG dinucleotide"
  misc_feature (61)..(61): /note="Nucleotide may be methylated to form 5-methylcytosine"
catgcatcaagggcctaaggatacataatagagccttgattaactcgtctttggtactaccgtaagtactagtgagaggctgcccacccagcatccagttcatccacacactctcctttcta

SEQ ID NO: 28124 - DNA, 122 bp, Homo sapiens
  misc_feature (61)..(62): /note="This region represents a CpG dinucleotide"
  misc_feature (61)..(61): /note="Nucleotide may be methylated to form 5-methylcytosine"
cagtgacatgcatgttttgtctgacaacctgtacttaccactgacctctgtcaatatgcacgttatttataatccctcttaatgtgccacctcagatcctctctgctccacctgtctctggg

SEQ ID NO: 28125 - DNA, 122 bp, Homo sapiens
  misc_feature (61)..(62): /note="This region represents a CpG dinucleotide"
  misc_feature (61)..(61): /note="Nucleotide may be methylated to form 5-methylcytosine"
gttgccaattcagctgtttttcagctcagcacaaataaaaagtcggccttcatttctttgcgcctaaagtgatccaaaatttaagagtggagaaagccagaactttgcgcaactctccttcc

SEQ ID NO: 28126 - DNA, 122 bp, Homo sapiens
  misc_feature (61)..(62): /note="This region represents a CpG dinucleotide"
  misc_feature (61)..(61): /note="Nucleotide may be methylated to form 5-methylcytosine"
acctccacgtcttgctttcgccaggagctctccccctgtttcaagtctgttcctgtctttcgaccagtccggatctggacggctctctcctttttgctaatgaataaccaaccagcagaggc

SEQ ID NO: 28127 - DNA, 122 bp, Homo sapiens
  misc_feature (61)..(62): /note="This region represents a CpG dinucleotide"
  misc_feature (61)..(61): /note="Nucleotide may be methylated to form 5-methylcytosine"
gaaccgcaagcgcatgacctaccagaagctggcgcgcgccctccgaaactacgccaagaccggcgagatccgcaaggtcaagcgcaagctcacctaccagttcgacagcgcgctgctgcctg

SEQ ID NO: 28128 - DNA, 122 bp, Homo sapiens
  misc_feature (61)..(62): /note="This region represents a CpG dinucleotide"
  misc_feature (61)..(61): /note="Nucleotide may be methylated to form 5-methylcytosine"
tgtttatcagtgagttctaagccggttgtcggcctgcttggagggcggtttatctgtgcccgcctgcagtggctggggcgcccccaatgatgggaaaagggagcatctgcgtgggtgtggtg

SEQ ID NO: 28129 - DNA, 122 bp, Homo sapiens
  misc_feature (61)..(62): /note="This region represents a CpG dinucleotide"
  misc_feature (61)..(61): /note="Nucleotide may be methylated to form 5-methylcytosine"
ctatgtcttcccttctcttgagccatgagttgccacatccacgagcatgcccctgggacacgtgcacaaagagcctgtgcatctgaagctttcacagtgttttgcagagtaggcagttgagc

SEQ ID NO: 28130 - DNA, 122 bp, Homo sapiens
  misc_feature (61)..(62): /note="This region represents a CpG dinucleotide"
  misc_feature (61)..(61): /note="Nucleotide may be methylated to form 5-methylcytosine"
gtgtaggttggttaaggtagaacagtgcctcatccacagacaccagtcgcatcacagacacgtggacttagatgttgcaaccactctccagcaagtggcaggaaagtgttctaattctaatg

SEQ ID NO: 28131 - DNA, 122 bp, Homo sapiens
  misc_feature (61)..(62): /note="This region represents a CpG dinucleotide"
  misc_feature (61)..(61): /note="Nucleotide may be methylated to form 5-methylcytosine"
tggaatgctgccctcttatggttgcacaaatccttccagggtcaaacataaagccccagtcgctagttagggtacttaatagaaagacgtaagaactaggaagacataaaaaaattaaccca

SEQ ID NO: 28132 - DNA, 122 bp, Homo sapiens
  misc_feature (61)..(62): /note="This region represents a CpG dinucleotide"
  misc_feature (61)..(61): /note="Nucleotide may be methylated to form 5-methylcytosine"
cagttcccggtgctctgtgaggagccagcagccctgagcctgcagatcaagagctgaagacgctgcctcgattgaccctggaaggaaaccatggcagagtgtggacgcagcccttatgccaa

SEQ ID NO: 28133 - DNA, 122 bp, Homo sapiens
  misc_feature (61)..(62): /note="This region represents a CpG dinucleotide"
  misc_feature (61)..(61): /note="Nucleotide may be methylated to form 5-methylcytosine"
caaagaacaataaagtccggtgaattcccatacctccagtcatcaggcacagttactggtcggtgcagggcaggccagaagtgaccaaggcccaagagactcagacggccattcacaggcat

SEQ ID NO: 28134 - DNA, 122 bp, Homo sapiens
  misc_feature (61)..(62): /note="This region represents a CpG dinucleotide"
  misc_feature (61)..(61): /note="Nucleotide may be methylated to form 5-methylcytosine"
ataagcagagattgacatgataaattagttgggatcttaagaagtcagggaaaacttccccgttataatgatgactgagtgatgtagtcatcagctaatcaagggagcacagatgagagcta

SEQ ID NO: 28135 - DNA, 122 bp, Homo sapiens
  misc_feature (61)..(62): /note="This region represents a CpG dinucleotide"
  misc_feature (61)..(61): /note="Nucleotide may be methylated to form 5-methylcytosine"
agctcacatgagtcacaaccatttgccataaagcattaggaattaggcctctgggattaacgccaggttcctggtttagaagtacaaagacttgacactgaaggcagctgtgaacaataaac

SEQ ID NO: 28136 - DNA, 122 bp, Homo sapiens
  misc_feature (61)..(62): /note="This region represents a CpG dinucleotide"
  misc_feature (61)..(61): /note="Nucleotide may be methylated to form 5-methylcytosine"
tctgctttacaaaccctagagaccacttggcacaaactcctgattttacaagtaagagaacgtgagctccaggcagtcagagccttgcacagaatccacttggaccaggcctgtgacggggc

SEQ ID NO: 28137 - DNA, 122 bp, Homo sapiens
  misc_feature (61)..(62): /note="This region represents a CpG dinucleotide"
  misc_feature (61)..(61): /note="Nucleotide may be methylated to form 5-methylcytosine"
ctcactatgagcactcaccttaaaggttattatctgcctcttgaagaagcacttactcagcggatcctgtaacatgtggttctgccactttgtccataactgattagaccagggcaagcctc

SEQ ID NO: 28138 - DNA, 122 bp, Homo sapiens
  misc_feature (61)..(62): /note="This region represents a CpG dinucleotide"
  misc_feature (61)..(61): /note="Nucleotide may be methylated to form 5-methylcytosine"
gctctaggaattacatttttatgaattttagtaactcggtgtgacagccagcctccaagacggctcctagtgattcacacgcttatgtagtcccattccacagtggatggggtgacctgtgt

SEQ ID NO: 28139 - DNA, 122 bp, Homo sapiens
  misc_feature (61)..(62): /note="This region represents a CpG dinucleotide"
  misc_feature (61)..(61): /note="Nucleotide may be methylated to form 5-methylcytosine"
tacccgcaagagacgccccaaccttcaggctgctttatgtctccaaagctctgcaggtgccgctcttccccagaggacaccccttccctgccagtcaaccccaccagccgcaggcagacatt

SEQ ID NO: 28140 - DNA, 122 bp, Homo sapiens
  misc_feature (61)..(62): /note="This region represents a CpG dinucleotide"
  misc_feature (61)..(61): /note="Nucleotide may be methylated to form 5-methylcytosine"
tcatttttagagagtccagcctatttttctgtgtatgtggactggagtttgagggtagcacgccttttgcagacagcataatggtggctggagcaattcaagtgaaagaagttacaaaggac

SEQ ID NO: 28141 - DNA, 122 bp, Homo sapiens
  misc_feature (61)..(62): /note="This region represents a CpG dinucleotide"
  misc_feature (61)..(61): /note="Nucleotide may be methylated to form 5-methylcytosine"
tggataaaaccttgggtcgaggccattttgccgtggttaaacttgccaggcatgtctttacgggtgaaaaggtggcagtaaaagttattgacaagacaaaactggacactctagctactggt

SEQ ID NO: 28142 - DNA, 122 bp, Homo sapiens
  misc_feature (61)..(62): /note="This region represents a CpG dinucleotide"
  misc_feature (61)..(61): /note="Nucleotide may be methylated to form 5-methylcytosine"
actagaattcggacttctaggaagggctgtattgtccttatcatcagaatccctccctcccgtccctgtgacctcccaacttcacaaacatgtcttgcctgcaccctaggcaaacgtggaaa

SEQ ID NO: 28143 - DNA, 122 bp, Homo sapiens
  misc_feature (61)..(62): /note="This region represents a CpG dinucleotide"
  misc_feature (61)..(61): /note="Nucleotide may be methylated to form 5-methylcytosine"
actgactgagaccagagttagagataaatgattggttttttccctttagagaaagcctagcgtttgtcatttatggtgtatttatttgcttatgaaaataacctaatgaggatggacccttt

SEQ ID NO: 28144 - DNA, 122 bp, Homo sapiens
  misc_feature (61)..(62): /note="This region represents a CpG dinucleotide"
  misc_feature (61)..(61): /note="Nucleotide may be methylated to form 5-methylcytosine"
gctgaataattaatgccagctctgataatcctgcctgacttaaaaatggttcattattaccgataacaaccatgacaatttactgagagctcactgcctgccctaagtcctttttctgtcat

SEQ ID NO: 28145 - DNA, 122 bp, Homo sapiens
  misc_feature (61)..(62): /note="This region represents a CpG dinucleotide"
  misc_feature (61)..(61): /note="Nucleotide may be methylated to form 5-methylcytosine"
gaggcaggaggattgcttaagcctaggagttcacgaccagcctaagcaacaattgagactcgcctcccaagccttcccaccccgttctctatttaaaataataatagtcatcttaatgggtg

SEQ ID NO: 28146 - DNA, 122 bp, Homo sapiens
  misc_feature (61)..(62): /note="This region represents a CpG dinucleotide"
  misc_feature (61)..(61): /note="Nucleotide may be methylated to form 5-methylcytosine"
agtattatttgtggcatggtctgtgtggctctgaatatatctgtttctgggggtgtccatcgcccgacctggagttgtgagaacacccggtagggtgtgcgtgtaccgggatccctgccgag

SEQ ID NO: 28147 - DNA, 122 bp, Homo sapiens
  misc_feature (61)..(62): /note="This region represents a CpG dinucleotide"
  misc_feature (61)..(61): /note="Nucleotide may be methylated to form 5-methylcytosine"
tgaatgctttcaaaaggcagaatgagttaagacttagtcatgtctcttggatttggcaatcgagagcccattggttatttgctagtatggttttagttgagttctagggagagagatagatt

SEQ ID NO: 28148 - DNA, 122 bp, Homo sapiens
  misc_feature (61)..(62): /note="This region represents a CpG dinucleotide"
  misc_feature (61)..(61): /note="Nucleotide may be methylated to form 5-methylcytosine"
gcctttaaggagcccttatgttcgtcaccctggtgcagaaattggcatgcctcatttaggcgccatcctccacaaagtcactcatatcccaaccgggagccagctctgacatctagtcatcg

SEQ ID NO: 28149 - DNA, 122 bp, Homo sapiens
  misc_feature (61)..(62): /note="This region represents a CpG dinucleotide"
  misc_feature (61)..(61): /note="Nucleotide may be methylated to form 5-methylcytosine"
caagccacacctgccagagctggcccagtggctctacttctacctgaatttgtcaagggacgcagcctcctgttgcactggaaacacccagacagcagggcagccaactgcatccacccacc

SEQ ID NO: 28150 - DNA, 122 bp, Homo sapiens
  misc_feature (61)..(62): /note="This region represents a CpG dinucleotide"
  misc_feature (61)..(61): /note="Nucleotide may be methylated to form 5-methylcytosine"
tagggcctctggaggcctcaccttcagttctgtgaacccctggctggccgcttccagccacgctagccaccctccagcgtccaaatgaggcagccacagctcccctgccaaggtcttggtct

SEQ ID NO: 28151 - DNA, 122 bp, Homo sapiens
  misc_feature (61)..(62): /note="This region represents a CpG dinucleotide"
  misc_feature (61)..(61): /note="Nucleotide may be methylated to form 5-methylcytosine"
ctgccaggccctaggcctagggccccaccctaggaatgttcagcccccaatcatcatcagcggcactggctagagagcaagtctaagggaagctggcctcagtgtttctggaaactcaggaa

SEQ ID NO: 28152 - DNA, 122 bp, Homo sapiens
  misc_feature (61)..(62): /note="This region represents a CpG dinucleotide"
  misc_feature (61)..(61): /note="Nucleotide may be methylated to form 5-methylcytosine"
aatatatttattacagctaaaagatggcggcaaggcagcccaggcaaatgtaagaataggcgatgtggttctcagcattgatggaataaatgcacaaggaatgactcatcttgaagcccaga

SEQ ID NO: 28153 - DNA, 122 bp, Homo sapiens
  misc_feature (61)..(62): /note="This region represents a CpG dinucleotide"
  misc_feature (61)..(61): /note="Nucleotide may be methylated to form 5-methylcytosine"
ctcagggtgactgtctcctgtatttttgctcttatgactcagtgcaatttaaaatatccccgggtttaatacaaactttctcagaagccgatttccaatggacagtaatccccttcaaatac

SEQ ID NO: 28154 - DNA, 122 bp, Homo sapiens
  misc_feature (61)..(62): /note="This region represents a CpG dinucleotide"
  misc_feature (61)..(61): /note="Nucleotide may be methylated to form 5-methylcytosine"
ttctgcttaagttattaccacccagatattgacaggtgaggctgtcagacttctcaaagacgaatctaatatgaattgtgaatttgttgtgtcagtgactacattcggtttctatgaccagt

SEQ ID NO: 28155 - DNA, 122 bp, Homo sapiens
  misc_feature (61)..(62): /note="This region represents a CpG dinucleotide"
  misc_feature (61)..(61): /note="Nucleotide may be methylated to form 5-methylcytosine"
tttgagtgcttggctctgtaatcttggagacactctgcatacaccccacaattaagacatcgcaactccatgcaatgtttcttcagagaaagttagatgcaattagatcatttgaagatgga

SEQ ID NO: 28156 - DNA, 122 bp, Homo sapiens
  misc_feature (61)..(62): /note="This region represents a CpG dinucleotide"
  misc_feature (61)..(61): /note="Nucleotide may be methylated to form 5-methylcytosine"
agtaatgtggaaaactatcacttgaatattaagcctaacaagtacctgtcagcacagcagcggaagtttgcagtgacctgaaataccacacccaagggcattaagttcaaaagctaatactg

SEQ ID NO: 28157 - DNA, 122 bp, Homo sapiens
  misc_feature (61)..(62): /note="This region represents a CpG dinucleotide"
  misc_feature (61)..(61): /note="Nucleotide may be methylated to form 5-methylcytosine"
gtgctacagagctgacggaagcctcctcaccacagggcggcctcactgtggggtggttggcgggtgggggtgggggtcactgggcaggaatcccgaaacattggcagcatctggaaggcttt

SEQ ID NO: 28158 - DNA, 122 bp, Homo sapiens
  misc_feature (61)..(62): /note="This region represents a CpG dinucleotide"
  misc_feature (61)..(61): /note="Nucleotide may be methylated to form 5-methylcytosine"
acgtttcagaaatcacatttgtgtattcattcaataattatttctggagctcccacttggcgccaggacctctgctaggaaacaaggagccacagccctgttgtcatggagtttacatgtag

SEQ ID NO: 28159 - DNA, 122 bp, Homo sapiens
  misc_feature (61)..(62): /note="This region represents a CpG dinucleotide"
  misc_feature (61)..(61): /note="Nucleotide may be methylated to form 5-methylcytosine"
gatctgtcagtgacgctgtgaccaaggctcatcaccctgcgggccgtgggccccagagggcggcacagcttctataggagcacagggcccagggaggtgccctcatccttggctggaaggcc

SEQ ID NO: 28160 - DNA, 122 bp, Homo sapiens
  misc_feature (61)..(62): /note="This region represents a CpG dinucleotide"
  misc_feature (61)..(61): /note="Nucleotide may be methylated to form 5-methylcytosine"
agggtgtgggggttgggggagggatgtgtgacaagcagcctgtgtcttcctgggccctggcggtcaaggccatgatctcagctaagcccagactcacactggagctcttcagcctgagcacc

SEQ ID NO: 28161 - DNA, 122 bp, Homo sapiens
  misc_feature (61)..(62): /note="This region represents a CpG dinucleotide"
  misc_feature (61)..(61): /note="Nucleotide may be methylated to form 5-methylcytosine"
gagaacttattattatatgcttcgcttaccctgtatatcaagagctgcaaacatcctgtgcgagtcccaaagtgaaaggtaaaatatggttctattaaattttaaacatagtaacacgaata

SEQ ID NO: 28162 - DNA, 122 bp, Homo sapiens
  misc_feature (61)..(62): /note="This region represents a CpG dinucleotide"
  misc_feature (61)..(61): /note="Nucleotide may be methylated to form 5-methylcytosine"
cttggttccagggagactccctcgatgctattccagcctttcagatggcctgttgtgtgacgctggctgtgtctcaatttccggtttgatcaatggttttacattacttcagccacaaaatc

SEQ ID NO: 28163 - DNA, 122 bp, Homo sapiens
  misc_feature (61)..(62): /note="This region represents a CpG dinucleotide"
  misc_feature (61)..(61): /note="Nucleotide may be methylated to form 5-methylcytosine"
ctggagtacgacagtggtagcctgaagatggaacctgggacttctaagtggcggagggagcggcctgagagctgtgatgattcatccaagggtggagaactgaaaaagcccatcagcctggg

SEQ ID NO: 28164 - DNA, 122 bp, Homo sapiens
  misc_feature (61)..(62): /note="This region represents a CpG dinucleotide"
  misc_feature (61)..(61): /note="Nucleotide may be methylated to form 5-methylcytosine"
ggagctgtataagtaggaggaaggggaggtgttacagaagccgctgtccatggtgccacacggacacttcagctccagcttgcagagcttgcaggactagggttattaaaagcctgacatgc

SEQ ID NO: 28165 - DNA, 122 bp, Homo sapiens
  misc_feature (61)..(62): /note="This region represents a CpG dinucleotide"
  misc_feature (61)..(61): /note="Nucleotide may be methylated to form 5-methylcytosine"
aatatatgagctgctggaaccagttctgcttccagacaaggagtgatttgctggcatggacgtgtccatgtgaagggtggtgatcacatggcctagatatatgctatccatcagtccagcct

SEQ ID NO: 28166 - DNA, 122 bp, Homo sapiens
  misc_feature (61)..(62): /note="This region represents a CpG dinucleotide"
  misc_feature (61)..(61): /note="Nucleotide may be methylated to form 5-methylcytosine"
gccatgaagcataacagggattaggatgggacaccctggtggccattattctcctaaccacgcaagtcactgtgtaacttggggcaagttacttaacctgtctgagtggcagtttactaatc

SEQ ID NO: 28167 - DNA, 122 bp, Homo sapiens
  misc_feature (61)..(62): /note="This region represents a CpG dinucleotide"
  misc_feature (61)..(61): /note="Nucleotide may be methylated to form 5-methylcytosine"
tttccactgttctagattatccccatgttttttcacttgacagagattatgatgaggaaccggttacacccacgctacctcccagtgagccttccccaccacacaaagctgcctccaggatt

SEQ ID NO: 28168 - DNA, 122 bp, Homo sapiens
  misc_feature (61)..(62): /note="This region represents a CpG dinucleotide"
  misc_feature (61)..(61): /note="Nucleotide may be methylated to form 5-methylcytosine"
aaaaccaaaccaaaccaaacaaaaacaaactggagagttaactgagcttaggtcattctgcgctgtggttaagcgtggtattagtcatctgatttttggcaagttactccttctacgcctca

SEQ ID NO: 28169 - DNA, 122 bp, Homo sapiens
  misc_feature (61)..(62): /note="This region represents a CpG dinucleotide"
  misc_feature (61)..(61): /note="Nucleotide may be methylated to form 5-methylcytosine"
aaacataaccatacactcagaatgtgtttgtggactaggtatgtgtccagagctgccgctcgccccttctattttggacacctgagaccttgcacattaggtatgggcagggccacctggaa

SEQ ID NO: 28170 - DNA, 122 bp, Homo sapiens
  misc_feature (61)..(62): /note="This region represents a CpG dinucleotide"
  misc_feature (61)..(61): /note="Nucleotide may be methylated to form 5-methylcytosine"
tagtgtggtggtgcagacaacacccagttcataaagggcagctcatgtttcatgaaccctcgcatgctgaggacccaagattaagtcagatgctaggatgtggaagagggcttgcttttgct

SEQ ID NO: 28171 - DNA, 122 bp, Homo sapiens
  misc_feature (61)..(62): /note="This region represents a CpG dinucleotide"
  misc_feature (61)..(61): /note="Nucleotide may be methylated to form 5-methylcytosine"
aagtgctgggattataggcgtgagccactgcacccagccacatttattttttgagactgtcgcccaggctggagtggcggaatcactcttcactgcagcctcgacctccagggctcaagtca

SEQ ID NO: 28172 - DNA, 122 bp, Homo sapiens
  misc_feature (61)..(62): /note="This region represents a CpG dinucleotide"
  misc_feature (61)..(61): /note="Nucleotide may be methylated to form 5-methylcytosine"
cctctgaaaacctaaccagacattaagaggaagaatcccaggctcatcagtcatctaacacggagagtggaatacaggaaaagctctcagagagaaagaaactctgtagatttctgttttta

SEQ ID NO: 28173 - DNA, 122 bp, Homo sapiens
  misc_feature (61)..(62): /note="This region represents a CpG dinucleotide"
  misc_feature (61)..(61): /note="Nucleotide may be methylated to form 5-methylcytosine"
gctgtggagaaatagacgccttagaacagattctggccttcctgtttctctgttcctgatcgctccctttcagtgaaatggagtacagagagacagctgcacgctccatcgaccaggcatat

SEQ ID NO: 28174 - DNA, 122 bp, Homo sapiens
  misc_feature (61)..(62): /note="This region represents a CpG dinucleotide"
  misc_feature (61)..(61): /note="Nucleotide may be methylated to form 5-methylcytosine"
gccggaacctccatcattcttgtgggtaaccacttgctacaacaaatgaccatgacctaccgtgggaggctggagaaatcttgcatttacttgtccgtgtatgccattttctcagttatcat

SEQ ID NO: 28175 - DNA, 122 bp, Homo sapiens
  misc_feature (61)..(62): /note="This region represents a CpG dinucleotide"
  misc_feature (61)..(61): /note="Nucleotide may be methylated to form 5-methylcytosine"
tcctgagcaggcagggctggcctgagtcatccccagcattaacggcagggcctggcaccccggcaagaaaaacataatggactctggcaccggatggtcctggttcaaatcccagttctact

SEQ ID NO: 28176 - DNA, 122 bp, Homo sapiens
  misc_feature (61)..(62): /note="This region represents a CpG dinucleotide"
  misc_feature (61)..(61): /note="Nucleotide may be methylated to form 5-methylcytosine"
gtctttgggttttcatttatgaaggcttccatgtcacattgaactttgttaaatttgtcacgcttttctcttgctaacctatcttttgttataagggtattggctgtgactcttgttacagg

SEQ ID NO: 28177 - DNA, 122 bp, Homo sapiens
  misc_feature (61)..(62): /note="This region represents a CpG dinucleotide"
  misc_feature (61)..(61): /note="Nucleotide may be methylated to form 5-methylcytosine"
ttcaacactcatttgccagaacccttaggatagcacatgaggtgtaaccggaaatcgaggcgttgggtgtcatggttactttgcagggctgggccccgggacttttctgcaggaagttcatt

SEQ ID NO: 28178 - DNA, 122 bp, Homo sapiens
  misc_feature (61)..(62): /note="This region represents a CpG dinucleotide"
  misc_feature (61)..(61): /note="Nucleotide may be methylated to form 5-methylcytosine"
actttgctaagtactccatgcagattaccttatttaaccctcacatgtagtacctaagaacgtcggctccaaagccaggttgagtttgaatgctgactcctccgtgtcttagctgtgtgatc

SEQ ID NO: 28179 - DNA, 122 bp, Homo sapiens
  misc_feature (61)..(62): /note="This region represents a CpG dinucleotide"
  misc_feature (61)..(61): /note="Nucleotide may be methylated to form 5-methylcytosine"
gcatgaagaaagattctcatgttgctaagatttcttgcaccgctcttaagcttctgattacgcagaagctggattaactatctcacagtagcagggcagacagtagcatggcagacagcatg

SEQ ID NO: 28180 - DNA, 122 bp, Homo sapiens
  misc_feature (61)..(62): /note="This region represents a CpG dinucleotide"
  misc_feature (61)..(61): /note="Nucleotide may be methylated to form 5-methylcytosine"
gttcagcctgccccgccctccgtcctggtccccaccctccatcctggctccgttcagaaacgtgccccagggaccaggtttgctcagttgacaggttgtctggcctgcagcctgtgcagctc

SEQ ID NO: 28181 - DNA, 122 bp, Homo sapiens
  misc_feature (61)..(62): /note="This region represents a CpG dinucleotide"
  misc_feature (61)..(61): /note="Nucleotide may be methylated to form 5-methylcytosine"
ccccagtacttgctggcagggattaagagcagataaaagtgtgctcacacactgtagacacggctaccatgccatccacagtgttgccatccacagtgttgccatcactcctgcccacagca

SEQ ID NO: 28182 - DNA, 122 bp, Homo sapiens
  misc_feature (61)..(62): /note="This region represents a CpG dinucleotide"
  misc_feature (61)..(61): /note="Nucleotide may be methylated to form 5-methylcytosine"
ctagatgccagatcatttcattctgaccttcttcagtttgctttcctgttttgaaaaattcggattttcttatataattatgatgctattaacacctaacataattaacaattctttgaaat

SEQ ID NO: 28183 - DNA, 122 bp, Homo sapiens
  misc_feature (61)..(62): /note="This region represents a CpG dinucleotide"
  misc_feature (61)..(61): /note="Nucleotide may be methylated to form 5-methylcytosine"
cttcccaccctgattaccaaacattctgtagggcaagcttgcatcttcagctaaggagaacgcttcagcctgcaggtgacaaaacagtctctgaaagaggaagcatggttttgaaatgaacc

SEQ ID NO: 28184 - DNA, 122 bp, Homo sapiens
  misc_feature (61)..(62): /note="This region represents a CpG dinucleotide"
  misc_feature (61)..(61): /note="Nucleotide may be methylated to form 5-methylcytosine"
tcaactgttttgcactcaacaaagacatacctctgagttggcaaccagcagggtggataacgggccagtggtgataaaatcaaagaataggtaatgaaacaatcatccagttaacaatcagc

SEQ ID NO: 28185 - DNA, 122 bp, Homo sapiens
  misc_feature (61)..(62): /note="This region represents a CpG dinucleotide"
  misc_feature (61)..(61): /note="Nucleotide may be methylated to form 5-methylcytosine"
tacctttttttcattattccctgtgtcagtgtcagcaccttctgctgaaactcactacagcgtatctctacaaaatctcttgcctttcttagggaggaaagtgacacgattcagccagtttt

SEQ ID NO: 28186 - DNA, 122 bp, Homo sapiens
  misc_feature (61)..(62): /note="This region represents a CpG dinucleotide"
  misc_feature (61)..(61): /note="Nucleotide may be methylated to form 5-methylcytosine"
cctggagagattacaaaggcccaactcttcctgttgtgtagagaacagaaccaattggtacgcacttggcaggccagagtttacattagccatgcagtaaagagtgaagaattctgacaggg

SEQ ID NO: 28187 - DNA, 122 bp, Homo sapiens
  misc_feature (61)..(62): /note="This region represents a CpG dinucleotide"
  misc_feature (61)..(61): /note="Nucleotide may be methylated to form 5-methylcytosine"
acctgagtttgggtttcacttcctgcgttgggccttgtggcttccttactattatgtcagcgtagcagcacgtttgaaagatgtctaaaacagcatggaacagcatttaagtttttatcagg

SEQ ID NO: 28188 - DNA, 122 bp, Homo sapiens
  misc_feature (61)..(62): /note="This region represents a CpG dinucleotide"
  misc_feature (61)..(61): /note="Nucleotide may be methylated to form 5-methylcytosine"
acacatctgtcccatctcacaacagaagtaaagacttgtattgactggttcttaaggacacgtaaaggatttagaagctgattcaaggatgtgtgcatcatggtcttacatatcagcaattc

SEQ ID NO: 28189 - DNA, 122 bp, Homo sapiens
  misc_feature (61)..(62): /note="This region represents a CpG dinucleotide"
  misc_feature (61)..(61): /note="Nucleotide may be methylated to form 5-methylcytosine"
aagggaagcaggaaggtcagcagtcccaggaaggccaaggagacgggatttctcagaagccgcgacgcgctcatctgccacccacacgaagacaaaacacaatggttatgcttcctcctcaa

SEQ ID NO: 28190 - DNA, 122 bp, Homo sapiens
  misc_feature (61)..(62): /note="This region represents a CpG dinucleotide"
  misc_feature (61)..(61): /note="Nucleotide may be methylated to form 5-methylcytosine"
accaaacgtctgcccaagggagggagggcgcggaacccacccatgggcaatgactcagcacgaatccactcttctgcttgctgacccctgacctctgactcgaagtcagggccctcagctgg

SEQ ID NO: 28191 - DNA, 122 bp, Homo sapiens
  misc_feature (61)..(62): /note="This region represents a CpG dinucleotide"
  misc_feature (61)..(61): /note="Nucleotide may be methylated to form 5-methylcytosine"
tgaacagcggaagaacaatgcttccacatcctgtaagggtacctaagcgggttgcctaagcgttgctgctgggggctggggtgaccagctttaattcccttatttgtccctacccacttcct

SEQ ID NO: 28192 - DNA, 122 bp, Homo sapiens
  misc_feature (61)..(62): /note="This region represents a CpG dinucleotide"
  misc_feature (61)..(61): /note="Nucleotide may be methylated to form 5-methylcytosine"
tattcatttttgaggggagtatcacagaagggttctcactgcatcatagcaggagtagtgcgataccagtttgtttcatcacctggctaagatggtatctacattcatttgtcttactatgt

SEQ ID NO: 28193 - DNA, 122 bp, Homo sapiens
  misc_feature (61)..(62): /note="This region represents a CpG dinucleotide"
  misc_feature (61)..(61): /note="Nucleotide may be methylated to form 5-methylcytosine"
catgcccaaaatggtggctttcaaactctgacttcagcctacagtaaaatatacattgtacgtcttgacccatctgacaggcatacatttatgtagagggaaaacagaatggaagctttcat

SEQ ID NO: 28194 - DNA, 122 bp, Homo sapiens
  misc_feature (61)..(62): /note="This region represents a CpG dinucleotide"
  misc_feature (61)..(61): /note="Nucleotide may be methylated to form 5-methylcytosine"
cagctcagtgctctttctactgctgcctcactgccagattttcagtgtccttgtttttcacggaacatggtgacatagggtggtggttgagggcattatgatgcagtcagcatgcattggtg

SEQ ID NO: 28195 - DNA, 122 bp, Homo sapiens
  misc_feature (61)..(62): /note="This region represents a CpG dinucleotide"
  misc_feature (61)..(61): /note="Nucleotide may be methylated to form 5-methylcytosine"
aaatacatcctccaatcttcacttggtggacctggcatcaaaaaataatcatattaagtgcgtttattagtacacttttctggcttatctgcctttccaagtttctatttgagttcttgcct

SEQ ID NO: 28196 - DNA, 122 bp, Homo sapiens
  misc_feature (61)..(62): /note="This region represents a CpG dinucleotide"
  misc_feature (61)..(61): /note="Nucleotide may be methylated to form 5-methylcytosine"
agatatctgggccaaacagatttagaaatcatcagcacatagatggaagggagttgaagtcggtaagctttgcttcaggtagtattttatggcaagaagatgttggaggatagagatctgag

SEQ ID NO: 28197 - DNA, 122 bp, Homo sapiens
  misc_feature (61)..(62): /note="This region represents a CpG dinucleotide"
  misc_feature (61)..(61): /note="Nucleotide may be methylated to form 5-methylcytosine"
aggcactcaacctctctaagcctcattttccttgtctataagatggaacaagtaataacacgaatcatctcttaggactgatgtgaagattaactaaaagattgtctgtgaagggcctagtg

SEQ ID NO: 28198 - DNA, 122 bp, Homo sapiens
  misc_feature (61)..(62): /note="This region represents a CpG dinucleotide"
  misc_feature (61)..(61): /note="Nucleotide may be methylated to form 5-methylcytosine"
gctgcctcacaggaagcagggaataatgaaagatgaggcatttaaccttgtgtcctgcaacgctgttatactggcttattccagaagttttatattgattctatggaattttctatgtacat

SEQ ID NO: 28199 - DNA, 122 bp, Homo sapiens
  misc_feature (61)..(62): /note="This region represents a CpG dinucleotide"
  misc_feature (61)..(61): /note="Nucleotide may be methylated to form 5-methylcytosine"
gctcactcagtccatgctgctgctccctgtggcaggcagtcagggcatgttctgtgtgggcgcagtgcggtgctgcatggcaggctgcccagctgcctgggaacagggccacaactaagaac

SEQ ID NO: 28200 - DNA, 122 bp, Homo sapiens
  misc_feature (61)..(62): /note="This region represents a CpG dinucleotide"
  misc_feature (61)..(61): /note="Nucleotide may be methylated to form 5-methylcytosine"
aacaaatagttcattctgagacagcctttgtggtttctcttgatttcaccattctggtcccgtacttgattctctcatctgttcctttttaagcctaggttttaattttgtccctgaaatat

SEQ ID NO: 28201 - DNA, 122 bp, Homo sapiens
  misc_feature (61)..(62): /note="This region represents a CpG dinucleotide"
  misc_feature (61)..(61): /note="Nucleotide may be methylated to form 5-methylcytosine"
aacatttgaagggatctgtcagttactggtgggacagatcactgatgggtcaagcttgcacgtcatcaaatacagcacatcctgactcacaaaattcccccgacatcatctgggagcacact

SEQ ID NO: 28202 - DNA, 122 bp, Homo sapiens
  misc_feature (61)..(62): /note="This region represents a CpG dinucleotide"
  misc_feature (61)..(61): /note="Nucleotide may be methylated to form 5-methylcytosine"
tctccactcctcaactgtcaccttgatccagccagtgtcaacactgggctccctgctccccgcctcgcccctggctattctcatcagccaggcagccagggggtcctgttcaaacccaaagc

SEQ ID NO: 28203 - DNA, 122 bp, Homo sapiens
  misc_feature (61)..(62): /note="This region represents a CpG dinucleotide"
  misc_feature (61)..(61): /note="Nucleotide may be methylated to form 5-methylcytosine"
ggaaacaattttctctaaaaataaacagtttcactgccgggctacacagaacttcctgcccgcctaggatgcgtccgggcccaggggcgcagtagggatagagggccgggtggaggcccagg

SEQ ID NO: 28204 - DNA, 122 bp, Homo sapiens
  misc_feature (61)..(62): /note="This region represents a CpG dinucleotide"
  misc_feature (61)..(61): /note="Nucleotide may be methylated to form 5-methylcytosine"
ctttctctattgaagttgttcgagaacatttatggttatttcagcttcagtttctatttacgctgctggcttttatgcctcgacctcaggagggcattccaacttcaggttaactcacaagt

SEQ ID NO: 28205 - DNA, 122 bp, Homo sapiens
  misc_feature (61)..(62): /note="This region represents a CpG dinucleotide"
  misc_feature (61)..(61): /note="Nucleotide may be methylated to form 5-methylcytosine"
gcttggagaggaaggactccagatgaagtctgtgacatcatccccacagttaactctgctcgtgagcacatttttccactctatatcaatgaaaaccagagaatgtaagtggcatgtatatc

SEQ ID NO: 28206 - DNA, 122 bp, Homo sapiens
  misc_feature (61)..(62): /note="This region represents a CpG dinucleotide"
  misc_feature (61)..(61): /note="Nucleotide may be methylated to form 5-methylcytosine"
tcagctgtatcttgaaagctttcctgtttccgaagcttgcttgcattaaacatgaggcgccgctaagtgctgttgccaccagggactgcaggccgctctgcagccctggatgggctcagttc

SEQ ID NO: 28207 - DNA, 122 bp, Homo sapiens
  misc_feature (61)..(62): /note="This region represents a CpG dinucleotide"
  misc_feature (61)..(61): /note="Nucleotide may be methylated to form 5-methylcytosine"
gattataaatcctttaagtccaaactaaaagcccaaacagaaatgtagtcaccgtagccacgcactgcttgcttcttaaccaagtaaggcaatgaattgtggttattctcatagtagcaata

SEQ ID NO: 28208 - DNA, 122 bp, Homo sapiens
  misc_feature (61)..(62): /note="This region represents a CpG dinucleotide"
  misc_feature (61)..(61): /note="Nucleotide may be methylated to form 5-methylcytosine"
actgtggctgactcaatactgccacagcaaccagacttgcccaaggttccaaatgtcaagcgctacttaaaaatacccagcactcatcacttctggctgcactgatctacccaaaatgacca

SEQ ID NO: 28209 - DNA, 122 bp, Homo sapiens
  misc_feature (61)..(62): /note="This region represents a CpG dinucleotide"
  misc_feature (61)..(61): /note="Nucleotide may be methylated to form 5-methylcytosine"
agacctaacttctttcaaaccaggccatgaatcagacaggacttccaggccagaggagcacgtcaatggaggactttcaaagagaaagcactgataatagtggcgttaaagaaactggccag

SEQ ID NO: 28210 - DNA, 122 bp, Homo sapiens
  misc_feature (61)..(62): /note="This region represents a CpG dinucleotide"
  misc_feature (61)..(61): /note="Nucleotide may be methylated to form 5-methylcytosine"
gggctgctggaaggcgcgactgcaacttgactttgcctcactgttgttgctggcagaatacgtacaccaatgcggacaagctcctagaagcagcagagcagttggctcagacgggggaatgt

SEQ ID NO: 28211 - DNA, 122 bp, Homo sapiens
  misc_feature (61)..(62): /note="This region represents a CpG dinucleotide"
  misc_feature (61)..(61): /note="Nucleotide may be methylated to form 5-methylcytosine"
tcatactacgttcccttgcataatattcacaagatcctacttttggagagtggtgttggccgctcctagctggtgaataacacagaaacatcccaaagcctcttctcagcaaggatggggac

SEQ ID NO: 28212 - DNA, 122 bp, Homo sapiens
  misc_feature (61)..(62): /note="This region represents a CpG dinucleotide"
  misc_feature (61)..(61): /note="Nucleotide may be methylated to form 5-methylcytosine"
tttacatgtactcatgcaaaagaagggtgagataatggacttgccccagtgtggaactggcggaacagtgtgtgtgattcttattgtgaaacattcttaaatttgaggctcaaataataaat

SEQ ID NO: 28213 - DNA, 122 bp, Homo sapiens
  misc_feature (61)..(62): /note="This region represents a CpG dinucleotide"
  misc_feature (61)..(61): /note="Nucleotide may be methylated to form 5-methylcytosine"
ccaggaggtggaggttgcagtgagtgaagattgtgccattgtactccagcttgggtgacacggtgaaaacctgtctctacccctcccaaaaagaaaaaaaaaaaagcagaattaaaaacaaa

SEQ ID NO: 28214 - DNA, 122 bp, Homo sapiens
  misc_feature (61)..(62): /note="This region represents a CpG dinucleotide"
  misc_feature (61)..(61): /note="Nucleotide may be methylated to form 5-methylcytosine"
gtgtctttagaagagggatagtaatagaacctactcaggggtggacgtgaggattcgctacgctgtacatgaaagcattccgcagggctgagtaatcagcagcccattgacatcagggtata

SEQ ID NO: 28215 - DNA, 122 bp, Homo sapiens
  misc_feature (61)..(62): /note="This region represents a CpG dinucleotide"
  misc_feature (61)..(61): /note="Nucleotide may be methylated to form 5-methylcytosine"
ggcaattattctacttgtggccaattcaagcctcattcagaggtctgaagtgtttccccacggtacttacctggcaggaagtaaagtggccaaagccagaagtccattgtcccttctagagt

SEQ ID NO: 28216 - DNA, 122 bp, Homo sapiens
  misc_feature (61)..(62): /note="This region represents a CpG dinucleotide"
  misc_feature (61)..(61): /note="Nucleotide may be methylated to form 5-methylcytosine"
agcttctcattcttcaaggcccagtttagtccaggacactttacctttccctgctctccccgaagtctcccagctgggtgagtcacacctcctctgggctcctgctctatcccgtactttct

SEQ ID NO: 28217 - DNA, 122 bp, Homo sapiens
  misc_feature (61)..(62): /note="This region represents a CpG dinucleotide"
  misc_feature (61)..(61): /note="Nucleotide may be methylated to form 5-methylcytosine"
gaagcagagtgacaactctgagggaaccaagaaagcccaaaggggagacaaggtttagagcgaaatcaagatcggattttgtcatgaaaggcagaactggcaaaagcatcattacaaggcat

SEQ ID NO: 28218 - DNA, 122 bp, Homo sapiens
  misc_feature (61)..(62): /note="This region represents a CpG dinucleotide"
  misc_feature (61)..(61): /note="Nucleotide may be methylated to form 5-methylcytosine"
attgacctttgtgttatgaggtaatttgcttttttttttcttccacatccactaactgggcgtaagcttggaatgtatatctttgaaattgcaggtcaaagcctccgcattaaagcacccga

SEQ ID NO: 28219 - DNA, 122 bp, Homo sapiens
  misc_feature (61)..(62): /note="This region represents a CpG dinucleotide"
  misc_feature (61)..(61): /note="Nucleotide may be methylated to form 5-methylcytosine"
agcttgagctctgaaggagctggagaccgagtaactcaggtcagccatatgggcactccccgcctatgtgatcaacccctaaccacagctctggacacaaagtctcaggtgagcttcccagt

SEQ ID NO: 28220 - DNA, 122 bp, Homo sapiens
  misc_feature (61)..(62): /note="This region represents a CpG dinucleotide"
  misc_feature (61)..(61): /note="Nucleotide may be methylated to form 5-methylcytosine"
ccctgtcctattgtgcagggtcctgctgaatatgctgcttaacctctctgctctgacactcgctttggaaactgggattgccacccactttcgcagggtgtggggagagtgaaatgatgtaa

SEQ ID NO: 28221 - DNA, 122 bp, Homo sapiens
  misc_feature (61)..(62): /note="This region represents a CpG dinucleotide"
  misc_feature (61)..(61): /note="Nucleotide may be methylated to form 5-methylcytosine"
ctgaaaaggggaacctgcacctagggcagcctccagccctaatgactcacgtggaggaaacgtggggttagaagaacagattgtacaacaccacgggggtgagactgactgcagcccaccac

SEQ ID NO: 28222 - DNA, 122 bp, Homo sapiens
  misc_feature (61)..(62): /note="This region represents a CpG dinucleotide"
  misc_feature (61)..(61): /note="Nucleotide may be methylated to form 5-methylcytosine"
tctgggctccgcctcagggtgttgctccacgtcccagcaaaacagcttaaaaagcaaaaccgcagccaggagttgcatagatacctgaacacccgtgttcatagcagcatgagtcacggtgg

SEQ ID NO: 28223 - DNA, 122 bp, Homo sapiens
  misc_feature (61)..(62): /note="This region represents a CpG dinucleotide"
  misc_feature (61)..(61): /note="Nucleotide may be methylated to form 5-methylcytosine"
ttctcaataacagacaaatagataaaaaacaatctttttcttactttatctcatacttgacgaatgaagaggaaataaatagaagaaatcttctcaaggaagaggaagctacaaacacaagc

SEQ ID NO: 28224 - DNA, 122 bp, Homo sapiens
  misc_feature (61)..(62): /note="This region represents a CpG dinucleotide"
  misc_feature (61)..(61): /note="Nucleotide may be methylated to form 5-methylcytosine"
agtgagcactcatcatttttacaagttacacacacacactctagtgaagtgttaaacttacgtcatcaatttatcagataaggcagaaaacttgaaatctgacctttctgattcactgattt

SEQ ID NO: 28225 - DNA, 122 bp, Homo sapiens
  misc_feature (61)..(62): /note="This region represents a CpG dinucleotide"
  misc_feature (61)..(61): /note="Nucleotide may be methylated to form 5-methylcytosine"
agtctcataaactagggtcagagtaggtgaactcctaccatgtcccgaagccactgctctcgttcaattcgctccttcctccacctggcttctgactcatcaagctgttcttcagtctgatc

SEQ ID NO: 28226 - DNA, 122 bp, Homo sapiens
  misc_feature (61)..(62): /note="This region represents a CpG dinucleotide"
  misc_feature (61)..(61): /note="Nucleotide may be methylated to form 5-methylcytosine"
cctggtgagaaacgtttctgcctcgccttgaccttcccttgctccagacttgtaatcaaccgcacggattcctttgtaatagggactggtatttggaaatcaagatctggttgccaggtttg

SEQ ID NO: 28227 - DNA, 122 bp, Homo sapiens
  misc_feature (61)..(62): /note="This region represents a CpG dinucleotide"
  misc_feature (61)..(61): /note="Nucleotide may be methylated to form 5-methylcytosine"
gcttattttgggcctgggacattacaattgcttcctggcggggttccctgcctttagagtcgctccctgctaaaagtggatttgtcatgtagctaacaaatctcaagctccaggacagatgc

SEQ ID NO: 28228 - DNA, 122 bp, Homo sapiens
  misc_feature (61)..(62): /note="This region represents a CpG dinucleotide"
  misc_feature (61)..(61): /note="Nucleotide may be methylated to form 5-methylcytosine"
gggcactggggtacagcagccaacatcacacataaggtctctgctctcatggagctcacacgccagtgggagaagacagataataaacaaacaaaccataaaatacagtgatgaatgctgca

SEQ ID NO: 28229 - DNA, 122 bp, Homo sapiens
  misc_feature (61)..(62): /note="This region represents a CpG dinucleotide"
  misc_feature (61)..(61): /note="Nucleotide may be methylated to form 5-methylcytosine"
gcctgagtgaggcatgatgggtctcactcagtttctgggacatctgtctcgatgccctttcgtcaaccccatggctctctcagagcctgtcctcataccttcaactgctccccacccataac

SEQ ID NO: 28230 - DNA, 122 bp, Homo sapiens
  misc_feature (61)..(62): /note="This region represents a CpG dinucleotide"
  misc_feature (61)..(61): /note="Nucleotide may be methylated to form 5-methylcytosine"
cctgcttggctgttttgctcacagtgggaacctggtctggggtgattcactatcactcatcgctccacagaaggatggtgcccggtgcacatccccaggatagtgttaaccgtcacctttac

SEQ ID NO: 28231 - DNA, 122 bp, Homo sapiens
  misc_feature (61)..(62): /note="This region represents a CpG dinucleotide"
  misc_feature (61)..(61): /note="Nucleotide may be methylated to form 5-methylcytosine"
ccgtgtttggatggcaggatcccagggcagtgagtttcagggcataagcagacgttgccacgttgccttcaatcctactggacaagcatcggtgctggcctcccccatgtcctaacagctac

SEQ ID NO: 28232 - DNA, 122 bp, Homo sapiens
  misc_feature (61)..(62): /note="This region represents a CpG dinucleotide"
  misc_feature (61)..(61): /note="Nucleotide may be methylated to form 5-methylcytosine"
taaacacccacccagccactcagagagcctggtcagggcagccaaatgcctgcccaggaacgggacactcagcctgatcatttacaccatgagagtgagaacaagatctgctgcaagcctct

SEQ ID NO: 28233 - DNA, 122 bp, Homo sapiens
  misc_feature (61)..(62): /note="This region represents a CpG dinucleotide"
  misc_feature (61)..(61): /note="Nucleotide may be methylated to form 5-methylcytosine"
gtaaaatagagattcacccacaaaatgtaatagtaaagtttcaagaatgagaatggcagacgaagttttaggagaatgtctgttgctcaagtgaggcattcagtagaaagtagtggaaaatt

SEQ ID NO: 28234 - DNA, 122 bp, Homo sapiens
  misc_feature (61)..(62): /note="This region represents a CpG dinucleotide"
  misc_feature (61)..(61): /note="Nucleotide may be methylated to form 5-methylcytosine"
tgcccctccttctcctccccaccaggtggccatcaggcgcaggtgcaggcccagcccctacgtggtaaactttctggtgcccagtggcattctgattgccatcgatgccctcagtttctacc

SEQ ID NO: 28235 - DNA, 122 bp, Homo sapiens
  misc_feature (61)..(62): /note="This region represents a CpG dinucleotide"
  misc_feature (61)..(61): /note="Nucleotide may be methylated to form 5-methylcytosine"
aaaaagtgaaactatcttcatcttcctgcaacatgaccttctataggtatacctaaggtgcgctgcacacttttcttgatgttatcactacgtacacaagtcaccaaccaggaagagttctc

SEQ ID NO: 28236 - DNA, 122 bp, Homo sapiens
  misc_feature (61)..(62): /note="This region represents a CpG dinucleotide"
  misc_feature (61)..(61): /note="Nucleotide may be methylated to form 5-methylcytosine"
gagagccatgtgggtggttgtccttcaggttttgtcaattgtataaaactgacttgccatcgttcaccttcttctaaatttgcacttttcactataggcatgatgtatgtcaaacctcatta

SEQ ID NO: 28237 - DNA, 122 bp, Homo sapiens
  misc_feature (61)..(62): /note="This region represents a CpG dinucleotide"
  misc_feature (61)..(61): /note="Nucleotide may be methylated to form 5-methylcytosine"
aatttccccttcccctctccacagtgggcaaggccacctcttcccaccccctggaacctccgtcggtcagggtaggccctcttgggagtttctgctggcccagtactggtcccgggggactt

SEQ ID NO: 28238 - DNA, 122 bp, Homo sapiens
  misc_feature (61)..(62): /note="This region represents a CpG dinucleotide"
  misc_feature (61)..(61): /note="Nucleotide may be methylated to form 5-methylcytosine"
ccctggctgtgtaattccaagagacactgatgaatcatgctctttttttttcccaccaaacgttactaattcggctcatatcactgatgaaaaagctccagtttggagctgaatgtatattg

SEQ ID NO: 28239 - DNA, 122 bp, Homo sapiens
  misc_feature (61)..(62): /note="This region represents a CpG dinucleotide"
  misc_feature (61)..(61): /note="Nucleotide may be methylated to form 5-methylcytosine"
ggtggagcccaaatggaaaggtgattttagtcagctcagtgggcagaaattagaattctacgccactgaaatagttggactttgcagggcaaggaactagagaaatggaagccctgtgacag

SEQ ID NO: 28240 - DNA, 122 bp, Homo sapiens
  misc_feature (61)..(62): /note="This region represents a CpG dinucleotide"
  misc_feature (61)..(61): /note="Nucleotide may be methylated to form 5-methylcytosine"
atgtgactgatcatgacatcagtgattcctaattccaaactgtaaaaaacactcccagaacgctgacaacatattagatactcccagaaccacccttccttcacctcccaatctaatgtttg

SEQ ID NO: 28241 - DNA, 122 bp, Homo sapiens
  misc_feature (61)..(62): /note="This region represents a CpG dinucleotide"
  misc_feature (61)..(61): /note="Nucleotide may be methylated to form 5-methylcytosine"
cctgtcactgggcatcaatctgggcctcccaggcgccggtcacctgggaaagaccacagacgtcagtccccagtgtcatcagcccccccgcatcaggtcccaagtgggggtgtaggggcccg

SEQ ID NO: 28242 - DNA, 122 bp, Homo sapiens
  misc_feature (61)..(62): /note="This region represents a CpG dinucleotide"
  misc_feature (61)..(61): /note="Nucleotide may be methylated to form 5-methylcytosine"
attcccaactattttactattttgggggcactggggacagaacttctgggaaacataacacgcattagtccatttgttttctctgtgaattcttttcagcatctttgtgtagcaacaggaag

SEQ ID NO: 28243 - DNA, 122 bp, Homo sapiens
  misc_feature (61)..(62): /note="This region represents a CpG dinucleotide"
  misc_feature (61)..(61): /note="Nucleotide may be methylated to form 5-methylcytosine"
tgagagaggcacggaactgcagagggctcctacagcacagccaagatgccaaacagaagccggagacagatggagctgaactcagcctgtcctggtctgcctcctcctcccgaagtgtcctc

SEQ ID NO: 28244 - DNA, 122 bp, Homo sapiens
  misc_feature (61)..(62): /note="This region represents a CpG dinucleotide"
  misc_feature (61)..(61): /note="Nucleotide may be methylated to form 5-methylcytosine"
tttacttttgaaaattaacatagttatctgggggcgtgaaggggagcacagcagcaacaacggaagccttcagtgttcacttctggagcctcacgtcttgactgctgccacaaccaagtttt

SEQ ID NO: 28245 - DNA, 122 bp, Homo sapiens
  misc_feature (61)..(62): /note="This region represents a CpG dinucleotide"
  misc_feature (61)..(61): /note="Nucleotide may be methylated to form 5-methylcytosine"
tgatcataggggacacagaatgagcaaaacagttctgctgcactagcaaaaacgtgtgaacgtcaaacacaacaacaatcattctagatagtcatagctgctatttattgagttcctatcat

SEQ ID NO: 28246 - DNA, 122 bp, Homo sapiens
  misc_feature (61)..(62): /note="This region represents a CpG dinucleotide"
  misc_feature (61)..(61): /note="Nucleotide may be methylated to form 5-methylcytosine"
ctggggtagaaatagcctgacgttgcttcctggatggacctagaatgttgcacaaggtgacgtcagagtggttgcttagaagagaggtcattggatgcagttttccagctgagtacagtggg

SEQ ID NO: 28247 - DNA, 122 bp, Homo sapiens
  misc_feature (61)..(62): /note="This region represents a CpG dinucleotide"
  misc_feature (61)..(61): /note="Nucleotide may be methylated to form 5-methylcytosine"
aagttttctcatgtgggacctgaccttacatgctccttggatgggccacactggtgaccacgcgaggctttgatgctctcatcacagggacctgttctgagttttatgttgtctttgttggt

SEQ ID NO: 28248 - DNA, 122 bp, Homo sapiens
  misc_feature (61)..(62): /note="This region represents a CpG dinucleotide"
  misc_feature (61)..(61): /note="Nucleotide may be methylated to form 5-methylcytosine"
tttctttcctcggaccacatcacagtgcctgagattcttccttgtactatgggattaaagcgtcaaccgtcctggcatttattaacatgttacctttttctgcataattctcagctcgtcac

SEQ ID NO: 28249 - DNA, 122 bp, Homo sapiens
  misc_feature (61)..(62): /note="This region represents a CpG dinucleotide"
  misc_feature (61)..(61): /note="Nucleotide may be methylated to form 5-methylcytosine"
ctctcccttcctattttctctgccaaggtcataaaccttgaagtggaaaggatccttggacgtcaggcggtgcagcctccttgaggttctgaaatctggcagccacattctggcctacagca

SEQ ID NO: 28250 - DNA, 122 bp, Homo sapiens
  misc_feature (61)..(62): /note="This region represents a CpG dinucleotide"
  misc_feature (61)..(61): /note="Nucleotide may be methylated to form 5-methylcytosine"
atcctttgaagttggtaatgaggtcatccttctcccaagagtgaaagctacatttctacacgagttgtttcacagctagcctggtgtccagcagttgtccatgcagaccgggttcaccccta

SEQ ID NO: 28251 - DNA, 122 bp, Homo sapiens
  misc_feature (61)..(62): /note="This region represents a CpG dinucleotide"
  misc_feature (61)..(61): /note="Nucleotide may be methylated to form 5-methylcytosine"
cactggggtccaggctggcattcccatgccctgttttaccactgccctctccttctatgacgggtacagacatgagatgcttccagccagcctcatccaggtaagcctgtggagcagggatt

SEQ ID NO: 28252 - DNA, 122 bp, Homo sapiens
  misc_feature (61)..(62): /note="This region represents a CpG dinucleotide"
  misc_feature (61)..(61): /note="Nucleotide may be methylated to form 5-methylcytosine"
tggcagattcagtgagggcctgcttagtcatagacggtgactccttgctatgtcctcatgcggcagatggggcaaggcagttctctggttttataagtgcatgactcccattcctaggcttg

SEQ ID NO: 28253 - DNA, 122 bp, Homo sapiens
  misc_feature (61)..(62): /note="This region represents a CpG dinucleotide"
  misc_feature (61)..(61): /note="Nucleotide may be methylated to form 5-methylcytosine"
gccagcgggcccagcttaaacccacatttactaagagatgactgtgaggtcactactttgcgtatatattacctcattgttcataaagttaaaaaggccgtgtcttctgcttatggggaaat

SEQ ID NO: 28254 - DNA, 122 bp, Homo sapiens
  misc_feature (61)..(62): /note="This region represents a CpG dinucleotide"
  misc_feature (61)..(61): /note="Nucleotide may be methylated to form 5-methylcytosine"
ggggaaacagtggtgggcaaagaacacacctgcccctttcttcatggagtaaacagaccacgaaggaggactgacaagcaactgtaatccagtgagatgaacactgggatagggcaagtgca

SEQ ID NO: 28255 - DNA, 122 bp, Homo sapiens
  misc_feature (61)..(62): /note="This region represents a CpG dinucleotide"
  misc_feature (61)..(61): /note="Nucleotide may be methylated to form 5-methylcytosine"
accaaattagacagtgaagccagggatcagcattgtgcaatactgtagatgttaccacaacgatggaaatgtttgaaaagtagttcttgagcacttcaaatgtggctagtataaatgaggaa

SEQ ID NO: 28256 - DNA, 122 bp, Homo sapiens
  misc_feature (61)..(62): /note="This region represents a CpG dinucleotide"
  misc_feature (61)..(61): /note="Nucleotide may be methylated to form 5-methylcytosine"
agagagccaggctcagaggagtgctctcactgatgtagtctgttcttgtctccaggcccacgttgtcactagaagtcctgactctggagaggcctccaaatctggtcagtccaattccacca

SEQ ID NO: 28257 - DNA, 122 bp, Homo sapiens
  misc_feature (61)..(62): /note="This region represents a CpG dinucleotide"
  misc_feature (61)..(61): /note="Nucleotide may be methylated to form 5-methylcytosine"
cagcaagacacaactcggaagggccggcccagcactggtgcaggcttccccagggctgcccggttctggccagaactctgaagtgtagcagtacgtgccctggaggatctaaaatccatctc

SEQ ID NO: 28258 - DNA, 122 bp, Homo sapiens
  misc_feature (61)..(62): /note="This region represents a CpG dinucleotide"
  misc_feature (61)..(61): /note="Nucleotide may be methylated to form 5-methylcytosine"
gcaccaggctaatactgttcaataatgggtcgccaaaaaaggaaggaagcaggtaagaagcgcagcagccaagttcataaccctgctgctgacagtgtcaacatccacctcctgctgagtgc

SEQ ID NO: 28259 - DNA, 122 bp, Homo sapiens
  misc_feature (61)..(62): /note="This region represents a CpG dinucleotide"
  misc_feature (61)..(61): /note="Nucleotide may be methylated to form 5-methylcytosine"
tttacacaccagcatgatgaggaagaagtaagaatgcagatgagaaagagtgggcaatgtcgaaagaggaaaaccacaagagcgttgtcttgaagtcaaaatgaagaaagtatttcaaaaaa

SEQ ID NO: 28260 - DNA, 122 bp, Homo sapiens
  misc_feature (61)..(62): /note="This region represents a CpG dinucleotide"
  misc_feature (61)..(61): /note="Nucleotide may be methylated to form 5-methylcytosine"
agggaaaagggaacaaagaattaaaaacaggatcagcaagaattgaggaaaacatgataccggaagatgagtttgaggataagaaagaataatgaagattagagagagaagaggaggggaag

SEQ ID NO: 28261 - DNA, 122 bp, Homo sapiens
  misc_feature (61)..(62): /note="This region represents a CpG dinucleotide"
  misc_feature (61)..(61): /note="Nucleotide may be methylated to form 5-methylcytosine"
tgaagtttcacttcctgagctatatcagtaaaggaaagataaatatgccccaaatccaggcgtaagttctaacgttacactgttgtgtaaaaggctagatttctgttatggcttaagtcaag

SEQ ID NO: 28262 - DNA, 122 bp, Homo sapiens
  misc_feature (61)..(62): /note="This region represents a CpG dinucleotide"
  misc_feature (61)..(61): /note="Nucleotide may be methylated to form 5-methylcytosine"
ttttttgtagagtcagggtctagctaggttgcccaggttgctctcaaattcctgggcttacgcaatcctctgacttcagcctcccttacaggcatgctccaccacacccagtttaaagacat

SEQ ID NO: 28263 - DNA, 122 bp, Homo sapiens
  misc_feature (61)..(62): /note="This region represents a CpG dinucleotide"
  misc_feature (61)..(61): /note="Nucleotide may be methylated to form 5-methylcytosine"
ccatttattttggctggtggctccctctttctgtagtaagtgacattgacttgccatagccgtttgacctccttttaaggtgcaggaaggaggtactataagcatctggtttgttaacatct

SEQ ID NO: 28264 - DNA, 122 bp, Homo sapiens
  misc_feature (61)..(62): /note="This region represents a CpG dinucleotide"
  misc_feature (61)..(61): /note="Nucleotide may be methylated to form 5-methylcytosine"
ggggtggtaggaatggctcctgcatttgggacaggcgccaggagatgactgttagggctgcggctccagtgactagataagaacagacatcaaaagcaggcaattgctgttcttcccacaaa

SEQ ID NO: 28265 - DNA, 122 bp, Homo sapiens
  misc_feature (61)..(62): /note="This region represents a CpG dinucleotide"
  misc_feature (61)..(61): /note="Nucleotide may be methylated to form 5-methylcytosine"
aacctcagaaacagacgcttgctgacaccaatactccttcctgttacaaagcacactcggcggtgagctgagctatccttggggatctgatcaccagagaagatggattctaatatttagta

SEQ ID NO: 28266 - DNA, 122 bp, Homo sapiens
  misc_feature (61)..(62): /note="This region represents a CpG dinucleotide"
  misc_feature (61)..(61): /note="Nucleotide may be methylated to form 5-methylcytosine"
tctattatttttatttttgcaaaatgtttattttcactgtcacctgggatttctttgcctcggttgaatgtattgaaagattatatcctttatttaaagatgtctcattttacccccttgca

SEQ ID NO: 28267 - DNA, 122 bp, Homo sapiens
  misc_feature (61)..(62): /note="This region represents a CpG dinucleotide"
  misc_feature (61)..(61): /note="Nucleotide may be methylated to form 5-methylcytosine"
tcctgaagtctttcaatctggatagacaggcttcctgttgcataactatcctggaacttgcgttcactgcatttctgaatttgttccactgtttcacagacccaatccacttcatttccttc

SEQ ID NO: 28268 - DNA, 122 bp, Homo sapiens
  misc_feature (61)..(62): /note="This region represents a CpG dinucleotide"
  misc_feature (61)..(61): /note="Nucleotide may be methylated to form 5-methylcytosine"
caagatgcaaaaattgagtttcaaagaggaaaggccacatgcccagcgggacaggaaatacgagaagagtcaggatgtgaacccacactacgtgactctaaagtcagtgctcaataggctac

SEQ ID NO: 28269 - DNA, 122 bp, Homo sapiens
  misc_feature (61)..(62): /note="This region represents a CpG dinucleotide"
  misc_feature (61)..(61): /note="Nucleotide may be methylated to form 5-methylcytosine"
aacagccacacaattacagtaacaggtggtcagtttcaaaacaaatttcaaggtctgactcgcctggcacctgctctagaaccacagacagcagtttgacactgtctgggtccaagttaggt

SEQ ID NO: 28270 - DNA, 122 bp, Homo sapiens
  misc_feature (61)..(62): /note="This region represents a CpG dinucleotide"
  misc_feature (61)..(61): /note="Nucleotide may be methylated to form 5-methylcytosine"
gaacttgggtttgctcatggcttcctccttccttttggctgtttaattctttagtttccacgtaatttaggtctttgctttgtttttctatcaaattcctttccttccttccttcttccttt

SEQ ID NO: 28271 - DNA, 122 bp, Homo sapiens
  misc_feature (61)..(62): /note="This region represents a CpG dinucleotide"
  misc_feature (61)..(61): /note="Nucleotide may be methylated to form 5-methylcytosine"
cataatctttttgctgatggagagtcctggttaccccttacggggctctttcctgttcagcgtcatgaaaccaacacatcaaactgaaaatgagtatcaggcagtgcagctttattcagtag

SEQ ID NO: 28272 - DNA, 122 bp, Homo sapiens
  misc_feature (61)..(62): /note="This region represents a CpG dinucleotide"
  misc_feature (61)..(61): /note="Nucleotide may be methylated to form 5-methylcytosine"
ctctcccagccgtttcccagcgtgtcatgtgctgagaaatggtgggcttagccacgcaaacgtttactgagcatctactatttggtaggagctgttaggcaccatgctagcagtggagataa

SEQ ID NO: 28273 - DNA, 122 bp, Homo sapiens
  misc_feature (61)..(62): /note="This region represents a CpG dinucleotide"
  misc_feature (61)..(61): /note="Nucleotide may be methylated to form 5-methylcytosine"
cctcttgtttctctgatgattcaatctagtgacttatttaggataacaattggagaatatcgtagctaaataccatctcactgaggctcttttaggtgaccagagaagtagtaagggaaaga

SEQ ID NO: 28274 - DNA, 122 bp, Homo sapiens
  misc_feature (61)..(62): /note="This region represents a CpG dinucleotide"
  misc_feature (61)..(61): /note="Nucleotide may be methylated to form 5-methylcytosine"
tcctacaaattaacttaagacctaaatcaaggtctaacttttgcttgtccaagtgccagccggaagaacagctccgtgaagccagctaaccaaccaaccaaaaccctgctgctgccccaggg

SEQ ID NO: 28275 - DNA, 122 bp, Homo sapiens
  misc_feature (61)..(62): /note="This region represents a CpG dinucleotide"
  misc_feature (61)..(61): /note="Nucleotide may be methylated to form 5-methylcytosine"
aacactgagacagagggactaataacttgcccaagggcacacagctcacaaatagcaaaacggtggtcatgagctgaaagacttatgtgtttctgctctatgtgataatatagggtggtgca

SEQ ID NO: 28276 - DNA, 122 bp, Homo sapiens
  misc_feature (61)..(62): /note="This region represents a CpG dinucleotide"
  misc_feature (61)..(61): /note="Nucleotide may be methylated to form 5-methylcytosine"
ggctggaggctgaaggctgcgtcctgggtgggacaggagtcggtacctctcttcatttgacgctctctgggattggggaactggccttccacagagagactctgtttttgagcacatctgga

SEQ ID NO: 28277 - DNA, 122 bp, Homo sapiens
  misc_feature (61)..(62): /note="This region represents a CpG dinucleotide"
  misc_feature (61)..(61): /note="Nucleotide may be methylated to form 5-methylcytosine"
ctccagttgtgtgactgatttcactgcgtggctaactccactgttgcctgactccagctgcgtgacttcagctgtgtgactccatgtatgtgaccctagctgtgtgactccaactttcagtt

SEQ ID NO: 28278 - DNA, 122 bp, Homo sapiens
  misc_feature (61)..(62): /note="This region represents a CpG dinucleotide"
  misc_feature (61)..(61): /note="Nucleotide may be methylated to form 5-methylcytosine"
atcaatgtatgcaccttgtgcataataattacctactagctaccagatgtgcgcttttatcgtctctcttaagggcagtgactttgaagtgggtggtggtaaccccagtttgcagaagagga

SEQ ID NO: 28279 - DNA, 122 bp, Homo sapiens
  misc_feature (61)..(62): /note="This region represents a CpG dinucleotide"
  misc_feature (61)..(61): /note="Nucleotide may be methylated to form 5-methylcytosine"
ccctctagcctacaagagattaaaaggcctaaatctatcaacacctcatatccttgtttacgtaagtctccaccagaaatactgttaactctcatgcccctactactctacacatccctctc

SEQ ID NO: 28280 - DNA, 122 bp, Homo sapiens
  misc_feature (61)..(62): /note="This region represents a CpG dinucleotide"
  misc_feature (61)..(61): /note="Nucleotide may be methylated to form 5-methylcytosine"
gtgaaacaggaagaataaagggggctggagttagatacttccctttccctgagttggttacggcgctggtggtttcccttggcaaatgttacatgtgaccttgtaaacaatgtgtattctga

SEQ ID NO: 28281 - DNA, 122 bp, Homo sapiens
  misc_feature (61)..(62): /note="This region represents a CpG dinucleotide"
  misc_feature (61)..(61): /note="Nucleotide may be methylated to form 5-methylcytosine"
gcaacaaagctgctttgtggagcagggctcccaataggcagtgtgcccagagtagcagctcggaagcagtactgcaatcacatttatacccactttcaactatatgcaaatttaggggtgga

SEQ ID NO: 28282 - DNA, 122 bp, Homo sapiens
  misc_feature (61)..(62): /note="This region represents a CpG dinucleotide"
  misc_feature (61)..(61): /note="Nucleotide may be methylated to form 5-methylcytosine"
gagaagggtggggaggactgagaggaagctgggagagctgagcagagctggcataccaaacgcaggagttggactccatcctgagggcattcaagaagctggggagtgaccagatcacctgc

SEQ ID NO: 28283 - DNA, 122 bp, Homo sapiens
  misc_feature (61)..(62): /note="This region represents a CpG dinucleotide"
  misc_feature (61)..(61): /note="Nucleotide may be methylated to form 5-methylcytosine"
caggaggcccagagtgaatgggccttcaatgtgcggctcttaaggcatcaccagaggcatcgctggtgctcaggaagccccaggtgctcaggagggagtcccaaaggcttcttggagaaaca

SEQ ID NO: 28284 - DNA, 122 bp, Homo sapiens
  misc_feature (61)..(62): /note="This region represents a CpG dinucleotide"
  misc_feature (61)..(61): /note="Nucleotide may be methylated to form 5-methylcytosine"
aattgctctactggtgtgggtaccctgcacctgcctgcatgatgttacactgctggatggcggtgtgctgcagccggctggcctcttcctgcagccgcagagcagcatgacagagaggtaag

SEQ ID NO: 28285 - DNA, 122 bp, Homo sapiens
  misc_feature (61)..(62): /note="This region represents a CpG dinucleotide"
  misc_feature (61)..(61): /note="Nucleotide may be methylated to form 5-methylcytosine"
aagaggtaccttctcctcttccttattaatgacatcattaagtttgcttatttatagtctcgatcatctaacctcatgccctacatgaataaggggatttgtttagttgttaatcctcacag

SEQ ID NO: 28286 - DNA, 122 bp, Homo sapiens
  misc_feature (61)..(62): /note="This region represents a CpG dinucleotide"
  misc_feature (61)..(61): /note="Nucleotide may be methylated to form 5-methylcytosine"
cctgctactcaggaaacacacgcctatgctaatagactggagttcacaaggcctgggtctcgccctgctctgctctgcccaactgaagaacccaaatcaatggcttcatctctccagacagt

SEQ ID NO: 28287 - DNA, 122 bp, Homo sapiens
  misc_feature (61)..(62): /note="This region represents a CpG dinucleotide"
  misc_feature (61)..(61): /note="Nucleotide may be methylated to form 5-methylcytosine"
ttttagaaggcaggggccagctaccctttgtcccagcccagtgccagccacagcaggtcccgtggtctctgccctctgtgagttggtttcacagacagagccagaacactcctcccttggct

SEQ ID NO: 28288 - DNA, 122 bp, Homo sapiens
  misc_feature (61)..(62): /note="This region represents a CpG dinucleotide"
  misc_feature (61)..(61): /note="Nucleotide may be methylated to form 5-methylcytosine"
ttccaggagggccagggaggctctgtatatacgtagaggtcacccaggcgtgtgtgtgtgcgcgcccccacgcccctgcccacaggcctgcattgaaggcgcttccgctccccggagagccc

SEQ ID NO: 28289 - DNA, 122 bp, Homo sapiens
  misc_feature (61)..(62): /note="This region represents a CpG dinucleotide"
  misc_feature (61)..(61): /note="Nucleotide may be methylated to form 5-methylcytosine"
acaggggagctgttctcttccttcttgcctactaaactttccactccttaatccactctacgtgtgtctatgttgctaattttctcggcatgtgacaaaggaccctggatgtttccccagac

SEQ ID NO: 28290 - DNA, 122 bp, Homo sapiens
  misc_feature (61)..(62): /note="This region represents a CpG dinucleotide"
  misc_feature (61)..(61): /note="Nucleotide may be methylated to form 5-methylcytosine"
aaaaccactaatcatacgtgattctgaaacttcatttctggccaactgtttatgtctcggcgtttctacttttcttaccaaccttgctgagaattagcataatcagaatatctgcctcaggt

SEQ ID NO: 28291 - DNA, 122 bp, Homo sapiens
  misc_feature (61)..(62): /note="This region represents a CpG dinucleotide"
  misc_feature (61)..(61): /note="Nucleotide may be methylated to form 5-methylcytosine"
agagtgggaggaggaggacaatttcgcacctgagtgatccttttcataaaaatgggatcacgttacttcctactaagagaagggaaatgttatccgagaatgtggggctctcattctcggat

SEQ ID NO: 28292 - DNA, 122 bp, Homo sapiens
  misc_feature (61)..(62): /note="This region represents a CpG dinucleotide"
  misc_feature (61)..(61): /note="Nucleotide may be methylated to form 5-methylcytosine"
ggctgaggctttccccttgcagatcctctcagccatggcagaaagggtggagagggcaagcggaggactgggcagagctgcacggacacctggagttcttgtctggccacttcccatgttag

SEQ ID NO: 28293 - DNA, 122 bp, Homo sapiens
  misc_feature (61)..(62): /note="This region represents a CpG dinucleotide"
  misc_feature (61)..(61): /note="Nucleotide may be methylated to form 5-methylcytosine"
gcggtcttttcaacttactgtcaagggtgattacactggacagaaaaccacatcctctatcgccttttttattttgagacagagtctcgctctgtcgcccaggctgaagtgcagtggcatga

SEQ ID NO: 28294 - DNA, 122 bp, Homo sapiens
  misc_feature (61)..(62): /note="This region represents a CpG dinucleotide"
  misc_feature (61)..(61): /note="Nucleotide may be methylated to form 5-methylcytosine"
gctgtaacttagagatcataggcaaaagataactgcaactccttctccaaacactcccttcgcaatcaacaaaagatgacattccaaaaacaaattatatataagcctttgaattcctaagt

SEQ ID NO: 28295 - DNA, 122 bp, Homo sapiens
  misc_feature (61)..(62): /note="This region represents a CpG dinucleotide"
  misc_feature (61)..(61): /note="Nucleotide may be methylated to form 5-methylcytosine"
catctggatgcacgccaagacaagacgtcagtcatttcctggtgaaatgaaagaaagccacgcttcctccacgcccattgggtcacgaaatccttgctaatcctggccggggcactggagga

SEQ ID NO: 28296 - DNA, 122 bp, Homo sapiens
  misc_feature (61)..(62): /note="This region represents a CpG dinucleotide"
  misc_feature (61)..(61): /note="Nucleotide may be methylated to form 5-methylcytosine"
gagacggaccgaggaagccactttggtgaaacaaaaagaaaagcatttgtttatttagaacgggcaaaatgatacgtttcagtgggtgttttctttgtactttgatctttttgtactgatat

SEQ ID NO: 28297 - DNA, 122 bp, Homo sapiens
  misc_feature (61)..(62): /note="This region represents a CpG dinucleotide"
  misc_feature (61)..(61): /note="Nucleotide may be methylated to form 5-methylcytosine"
ctgctaattttctgtatgcacacagtagaggctcactcgggactacaggaagtgccaccccgagcccacttcctcaccacaggcctttatcccttacctttttatcttttcttttttttttc

SEQ ID NO: 28298 - DNA, 122 bp, Homo sapiens
  misc_feature (61)..(62): /note="This region represents a CpG dinucleotide"
  misc_feature (61)..(61): /note="Nucleotide may be methylated to form 5-methylcytosine"
gacaggtcttggtggccctgcctggttcttgccattgctctgaggtgagatatctggacacgtaaggtgtcactgtgattgtgtgggtgtcggtggggcagggctagaaggcaagcctggtg

SEQ ID NO: 28299 - DNA, 122 bp, Homo sapiens
  misc_feature (61)..(62): /note="This region represents a CpG dinucleotide"
  misc_feature (61)..(61): /note="Nucleotide may be methylated to form 5-methylcytosine"
ggaaaatgttaatttgtactagaaacctctcaaggcaggaaactgatgaaactctagcaacgctaggcagcacatgaagaggaaacaaaagcagaagaaatgaacagttgtaattaattaaa

SEQ ID NO: 28300 - DNA, 122 bp, Homo sapiens
  misc_feature (61)..(62): /note="This region represents a CpG dinucleotide"
  misc_feature (61)..(61): /note="Nucleotide may be methylated to form 5-methylcytosine"
agggatgtaaacaatataacgtgataaatatgctggcctagaagtggcaactcattcatacgtggagattctagaaaggcttcccagaagtgatggctaatgggaaacctgaaggacttgtc

SEQ ID NO: 28301 - DNA, 122 bp, Homo sapiens
  misc_feature (61)..(62): /note="This region represents a CpG dinucleotide"
  misc_feature (61)..(61): /note="Nucleotide may be methylated to form 5-methylcytosine"
catgatctacccgcctcggcctcccaaagtgctgggattacaggcgtgagccaccgcgcccggccaagttattcttttaagtggcagcttaaccctagcacagcagatttattttctgaggt

SEQ ID NO: 28302 - DNA, 122 bp, Homo sapiens
  misc_feature (61)..(62): /note="This region represents a CpG dinucleotide"
  misc_feature (61)..(61): /note="Nucleotide may be methylated to form 5-methylcytosine"
gagctcttagttcagtgacgtcacaagatctgccctgtgtcgttttcatccagatgttagcgtgctcttacagtggacacctgcagatcctgttgctgtgaagcactttgcctctcactcga

SEQ ID NO: 28303 - DNA, 122 bp, Homo sapiens
  misc_feature (61)..(62): /note="This region represents a CpG dinucleotide"
  misc_feature (61)..(61): /note="Nucleotide may be methylated to form 5-methylcytosine"
catggagaagagattaaattatgtttaataaatgttcattttatgttcattctttgaaaacgggcactcattgagtgacagatcttttaccacacacaaacactaacagatacgcgtaactg

SEQ ID NO: 28304 - DNA, 122 bp, Homo sapiens
  misc_feature (61)..(62): /note="This region represents a CpG dinucleotide"
  misc_feature (61)..(61): /note="Nucleotide may be methylated to form 5-methylcytosine"
ttgtcatgtaaattggggatgctgttagtacctatttcatgggcttgtgatgacatgaagcggggaaagcacttgttatatgtgtgagacatagtaggtactgaatgctagctgctgttatt

SEQ ID NO: 28305 - DNA, 122 bp, Homo sapiens
  misc_feature (61)..(62): /note="This region represents a CpG dinucleotide"
  misc_feature (61)..(61): /note="Nucleotide may be methylated to form 5-methylcytosine"
gattggccagggagggggcgattgagaacaggaagaagatggggtgagatctgagaggcacgctttggacacaataaacaagcctgctgccttgttcagaaagggacccgggacccccaatc

SEQ ID NO: 28306 - DNA, 122 bp, Homo sapiens
  misc_feature (61)..(62): /note="This region represents a CpG dinucleotide"
  misc_feature (61)..(61): /note="Nucleotide may be methylated to form 5-methylcytosine"
taaactgcacaaaacaagagtacccacaaagaagaatgaaaatgggcagaaacctacctacgagcaaaagagggagagccgccctgtttattcctacatgagaacatctttcttcctaagtc

SEQ ID NO: 28307 - DNA, 122 bp, Homo sapiens
  misc_feature (61)..(62): /note="This region represents a CpG dinucleotide"
  misc_feature (61)..(61): /note="Nucleotide may be methylated to form 5-methylcytosine"
ttgccaggcactcagcctgaggacattcactctctcttcaatatcagagcttggtttttacgtttcttcccgtacccctcagctagcacctaatattaactgccttgtcctacaagttctca

SEQ ID NO: 28308 - DNA, 122 bp, Homo sapiens
  misc_feature (61)..(62): /note="This region represents a CpG dinucleotide"
  misc_feature (61)..(61): /note="Nucleotide may be methylated to form 5-methylcytosine"
tctgtgtcttctgcaccagcccatctggatgcagtgcaacctgtctggtctgctatcctgcgttcccctaactggcaccctcctgggccagccagcagcaggacatagaccaaggccaacct

SEQ ID NO: 28309 - DNA, 122 bp, Homo sapiens
  misc_feature (61)..(62): /note="This region represents a CpG dinucleotide"
  misc_feature (61)..(61): /note="Nucleotide may be methylated to form 5-methylcytosine"
ggcccaatttagaagtctgcagaaactcagagggtcaggtcattaggaatgttaacgcggcgaccaagaattataaacatgatctgaaagtctcttccaattcatttcttcaagtatttatt

SEQ ID NO: 28310 - DNA, 122 bp, Homo sapiens
  misc_feature (61)..(62): /note="This region represents a CpG dinucleotide"
  misc_feature (61)..(61): /note="Nucleotide may be methylated to form 5-methylcytosine"
cagcaggctggacttgctgctacacccatccatcctgttttctccgctgcaaaacgggtacgtgagtgtcacatgtaagagtgtctggagccacgcaaatgctccataaacatgagccaggc

SEQ ID NO: 28311 - DNA, 122 bp, Homo sapiens
  misc_feature (61)..(62): /note="This region represents a CpG dinucleotide"
  misc_feature (61)..(61): /note="Nucleotide may be methylated to form 5-methylcytosine"
agtcctgagccaattccctgtggctcctcaagttggctgtgtggacttgggcaaatgtcccgccaaatccgaagccttgcttcctcctctatggggtaagagtaacaattcttacaacagga

SEQ ID NO: 28312 - DNA, 122 bp, Homo sapiens
  misc_feature (61)..(62): /note="This region represents a CpG dinucleotide"
  misc_feature (61)..(61): /note="Nucleotide may be methylated to form 5-methylcytosine"
ggtgatccgcgcgtctcggcctcccaaagtgctgggattacaggcgtgggccaccgtgcccggctgagacagaatcttgcactgtcatccaagctggagtgcagtggcacaatcttgggtca

SEQ ID NO: 28313 - DNA, 122 bp, Homo sapiens
  misc_feature (61)..(62): /note="This region represents a CpG dinucleotide"
  misc_feature (61)..(61): /note="Nucleotide may be methylated to form 5-methylcytosine"
caaaaggcaccagctctgaattaaaagttccatgactgcacaggatgatgcaacccagggcgggcttctggcacgctgcagcacatggacacagccagcacagggacactgcacacacaaga

SEQ ID NO: 28314 - DNA, 122 bp, Homo sapiens
  misc_feature (61)..(62): /note="This region represents a CpG dinucleotide"
  misc_feature (61)..(61): /note="Nucleotide may be methylated to form 5-methylcytosine"
aatgtatctagttacctctaattaggatagggctgggaaggaaataggaagagagagagtcggtaaaaaaataccaaagtccattggaaaacggagcacaggaaagtggaagagaggaggaa

SEQ ID NO: 28315 - DNA, 122 bp, Homo sapiens
  misc_feature (61)..(62): /note="This region represents a CpG dinucleotide"
  misc_feature (61)..(61): /note="Nucleotide may be methylated to form 5-methylcytosine"
gcccagagctcttaactctcatgctgagaacagctttgtgtgctgagtgtttcgcacacccgcaggccccgcacgttctgcctgctgttccctgtaatcctgacctcgcctgggagtggcag

SEQ ID NO: 28316 - DNA, 122 bp, Homo sapiens
  misc_feature (61)..(62): /note="This region represents a CpG dinucleotide"
  misc_feature (61)..(61): /note="Nucleotide may be methylated to form 5-methylcytosine"
caggtgcttgtctattccggaaaatttatatcttgcggttttgtggttaagagaaaatgacgctaccaatgaaaggtccccttttaggcccccagggctgggctagcaggccccactgtggt

SEQ ID NO: 28317 - DNA, 122 bp, Homo sapiens
  misc_feature (61)..(62): /note="This region represents a CpG dinucleotide"
  misc_feature (61)..(61): /note="Nucleotide may be methylated to form 5-methylcytosine"
tgcttgctcagctaagcactgatcctgctactgccagccattcgctgtgtggccttgtaacgtatgtaactgctctgtgcctcagctgtgtcatctgtgaaatgggaacaccaattattgct

SEQ ID NO: 28318 - DNA, 122 bp, Homo sapiens
  misc_feature (61)..(62): /note="This region represents a CpG dinucleotide"
  misc_feature (61)..(61): /note="Nucleotide may be methylated to form 5-methylcytosine"
tgcccaaggccaagtagtacacaagtgtggtggccagaactagaatttggacttttccagcggacgtgatagctagctgtgggccatctgtcttaggataaacccaccatcaatgttaattc

SEQ ID NO: 28319 - DNA, 122 bp, Homo sapiens
  misc_feature (61)..(62): /note="This region represents a CpG dinucleotide"
  misc_feature (61)..(61): /note="Nucleotide may be methylated to form 5-methylcytosine"
acaggtgagcaggtccgggtgagcaggttcaacaggagggaaccccaggatgggatgcatcgccacagaccaaatatctggagggtgtcccggagaacctgtgcttttttggaattcccttg

SEQ ID NO: 28320 - DNA, 122 bp, Homo sapiens
  misc_feature (61)..(62): /note="This region represents a CpG dinucleotide"
  misc_feature (61)..(61): /note="Nucleotide may be methylated to form 5-methylcytosine"
ttaattggtttgtagtctaagctgcctctgtttcacaaagcttttgtagcaagctgttttcgcaagtcactgaccagcctacagattggctttttctgggtcaggtgtcttctctgtaccaa

SEQ ID NO: 28321 - DNA, 122 bp, Homo sapiens
  misc_feature (61)..(62): /note="This region represents a CpG dinucleotide"
  misc_feature (61)..(61): /note="Nucleotide may be methylated to form 5-methylcytosine"
tatttctgtaataggtttgttgtgagaataaagggagcttggtatcagctcttagaataccggacaggccacgttggctccactaagctgttgtcatcatccctaagggcacccagttaaaa

SEQ ID NO: 28322 - DNA, 122 bp, Homo sapiens
  misc_feature (61)..(62): /note="This region represents a CpG dinucleotide"
  misc_feature (61)..(61): /note="Nucleotide may be methylated to form 5-methylcytosine"
ctcattttctgccatgccaggattctaccactcataagactcagcccagggttctacatacgccaaatgaaaatcagcaaccacagaagatttggaatatggcatttgactaactgcttcac

SEQ ID NO: 28323 - DNA, 122 bp, Homo sapiens
  misc_feature (61)..(62): /note="This region represents a CpG dinucleotide"
  misc_feature (61)..(61): /note="Nucleotide may be methylated to form 5-methylcytosine"
aggccctgccgctgcacgcccagggcatcagtacacatctggacatgtgagggacagtggcgcttggcccttgctgctcctcggagcctgaccactgcccctccctattccacgggacactg

SEQ ID NO: 28324 - DNA, 122 bp, Homo sapiens
  misc_feature (61)..(62): /note="This region represents a CpG dinucleotide"
  misc_feature (61)..(61): /note="Nucleotide may be methylated to form 5-methylcytosine"
tgttgctattttttttttttaatctccagtgatctatgatcatgcctcattgaacctgaccgatcagcagcctttgatccagctaattattacctgcttttgaagcactgtcttcacagtac

SEQ ID NO: 28325 - DNA, 122 bp, Homo sapiens
  misc_feature (61)..(62): /note="This region represents a CpG dinucleotide"
  misc_feature (61)..(61): /note="Nucleotide may be methylated to form 5-methylcytosine"
agtgagaggggtggaggcagggtgggcggggcaggggcagaggctggagtgggtgtatctcggggaccttcatgcctcatggcctccaccctcagctatgattccaacctcaacgcgtcccg

SEQ ID NO: 28326 - DNA, 122 bp, Homo sapiens
  misc_feature (61)..(62): /note="This region represents a CpG dinucleotide"
  misc_feature (61)..(61): /note="Nucleotide may be methylated to form 5-methylcytosine"
ctccttttaatcttgactttcacaaatacctggtggcaggtgtcatttccccattctacacgtacctgaggctcagagtgagacagcgactcacccaagatctcccagctacaaaatggcag

SEQ ID NO: 28327 - DNA, 122 bp, Homo sapiens
  misc_feature (61)..(62): /note="This region represents a CpG dinucleotide"
  misc_feature (61)..(61): /note="Nucleotide may be methylated to form 5-methylcytosine"
caaaaagtttcagtctagtgagagagatagacctctacaccaaaaattatagtcatggtgcgcttagagtgttacggtgacacagaggagggacatttaaatcagactggtaggtaggaagg

SEQ ID NO: 28328 - DNA, 122 bp, Homo sapiens
  misc_feature (61)..(62): /note="This region represents a CpG dinucleotide"
  misc_feature (61)..(61): /note="Nucleotide may be methylated to form 5-methylcytosine"
aaatttatttccccctgcttttctgggtaccaaatcaggtcaaggaaatttcctcctaaccgccccccacccccattaattcatttgcattgtcccaaagaagggatgatagattttctacc

SEQ ID NO: 28329 - DNA, 122 bp, Homo sapiens
  misc_feature (61)..(62): /note="This region represents a CpG dinucleotide"
  misc_feature (61)..(61): /note="Nucleotide may be methylated to form 5-methylcytosine"
acccaggttcatcagcagaagcaacaggctggaaatacaaataaaactctactggtaagacgagcacagaggcagctctattccaaaggtggttctaggagatgactccaagagctcaaagt

SEQ ID NO: 28330 - DNA, 122 bp, Homo sapiens
  misc_feature (61)..(62): /note="This region represents a CpG dinucleotide"
  misc_feature (61)..(61): /note="Nucleotide may be methylated to form 5-methylcytosine"
gggtgaaaatgacctcagtgaatagcccagctccctgggacagtggcctggtatttttgacgtgggagtggcgtctgctctgactcaacctggaccggcccagggacaacacctccttcgga

SEQ ID NO: 28331 - DNA, 122 bp, Homo sapiens
  misc_feature (61)..(62): /note="This region represents a CpG dinucleotide"
  misc_feature (61)..(61): /note="Nucleotide may be methylated to form 5-methylcytosine"
tttactcagtccctactcaagatgaagtcactctggtttgaacatctctgataatagaaccgctcagcaccccagctccattttccaaatcatccaatcaagccccagatcctaacacctcc

SEQ ID NO: 28332 - DNA, 122 bp, Homo sapiens
  misc_feature (61)..(62): /note="This region represents a CpG dinucleotide"
  misc_feature (61)..(61): /note="Nucleotide may be methylated to form 5-methylcytosine"
ctctaaatccctctgctttgccatgctacatctttgcattaaaggattttcactagtagccgtggtgatggtttattttaggcagtttcactaccagctatgctctctcttgtttctatgcc

SEQ ID NO: 28333 - DNA, 122 bp, Homo sapiens
  misc_feature (61)..(62): /note="This region represents a CpG dinucleotide"
  misc_feature (61)..(61): /note="Nucleotide may be methylated to form 5-methylcytosine"
tcttgctgcaaccccgtgaaacataacgtcacatttctacagctttaagtattttctcagcgcaaaagtaaagcaaatcttctgtcattgctagagagaaaggaggtttgtttacgctattc

SEQ ID NO: 28334 - DNA, 122 bp, Homo sapiens
  misc_feature (61)..(62): /note="This region represents a CpG dinucleotide"
  misc_feature (61)..(61): /note="Nucleotide may be methylated to form 5-methylcytosine"
actagcctcatgatgtttttgttttccagcaactttgctgcttaaagtgtgatccaaagacgagcagtacaggcctcacatgggcttgttagaaatacagatcccaggcccagccttaccta

SEQ ID NO: 28335 - DNA, 122 bp, Homo sapiens
  misc_feature (61)..(62): /note="This region represents a CpG dinucleotide"
  misc_feature (61)..(61): /note="Nucleotide may be methylated to form 5-methylcytosine"
cacaaaatcagagggttctttttaatcattagctttacccatccatctggaaaaataaagcggtgtaaaagcctacaagcatcaggaagcaaagaagactggaagtacaggcttaactaagt

SEQ ID NO: 28336 - DNA, 122 bp, Homo sapiens
  misc_feature (61)..(62): /note="This region represents a CpG dinucleotide"
  misc_feature (61)..(61): /note="Nucleotide may be methylated to form 5-methylcytosine"
gaagtaatgcccctaccacagacatccatgtcttaatccctggaacctacaaatatgttacgtcaatggaaaggaagattttaggttgcagatggattaaaattatgagtgagctgaagctg

SEQ ID NO: 28337 - DNA, 122 bp, Homo sapiens
  misc_feature (61)..(62): /note="This region represents a CpG dinucleotide"
  misc_feature (61)..(61): /note="Nucleotide may be methylated to form 5-methylcytosine"
tatgcacaaatactttttacttggcaaaccgcggagctcaggctttttatcgcttgcctacgaaatggaaggtgaacctgtcagcagatgatgcctgtcaattaacaatggttctcgcgaat

SEQ ID NO: 28338 - DNA, 122 bp, Homo sapiens
  misc_feature (61)..(62): /note="This region represents a CpG dinucleotide"
  misc_feature (61)..(61): /note="Nucleotide may be methylated to form 5-methylcytosine"
actcttgtccactcgcaacagagtgagactccaccttaaaaaaaaataaaaacaacaacacgactcctggcctaatggactgataaggtaaacaagaagaaagacacaggcctgtacacata

SEQ ID NO: 28339 - DNA, 122 bp, Homo sapiens
  misc_feature (61)..(62): /note="This region represents a CpG dinucleotide"
  misc_feature (61)..(61): /note="Nucleotide may be methylated to form 5-methylcytosine"
caaatcaactccaacagtcattttatcacttggctaaacattcagatacctgaatagtctcgcttgggtcagagaccttctgcttagctgggactgggcaaggcaccttgattgatggtccc

SEQ ID NO: 28340 - DNA, 122 bp, Homo sapiens
  misc_feature (61)..(62): /note="This region represents a CpG dinucleotide"
  misc_feature (61)..(61): /note="Nucleotide may be methylated to form 5-methylcytosine"
gcacacatagatctggaaacaacatacctttaagtactactctggctccttttgaatgagcgtagcacataagttctgagtcatattttccaaatgttgccacagttgtaatctgtgaccaa

SEQ ID NO: 28341 - DNA, 122 bp, Homo sapiens
  misc_feature (61)..(62): /note="This region represents a CpG dinucleotide"
  misc_feature (61)..(61): /note="Nucleotide may be methylated to form 5-methylcytosine"
tgcagatatcaggtgatcactgcagatatcatgtgatcgctgcggccttggagccagaggcgtccctgtttctgcttccccaagaggacattctcctcccatggggaaggcccccactcact

SEQ ID NO: 28342 - DNA, 122 bp, Homo sapiens
  misc_feature (61)..(62): /note="This region represents a CpG dinucleotide"
  misc_feature (61)..(61): /note="Nucleotide may be methylated to form 5-methylcytosine"
gtctactggattatttgtctcagatcttaggggaggaagtggaagagctggagaacagcacgtgttattttagagttataactggaagtatttggaatggcttctatgaaagtttatttcac

SEQ ID NO: 28343 - DNA, 122 bp, Homo sapiens
  misc_feature (61)..(62): /note="This region represents a CpG dinucleotide"
  misc_feature (61)..(61): /note="Nucleotide may be methylated to form 5-methylcytosine"
aacctgatgcacgtgacccctgcagactcacgccagccactgccacccccacaacccttgcgccctggccccaccctctgcaggtccccagatcaaccatgttcctcctgtcccagccactt

SEQ ID NO: 28344 - DNA, 122 bp, Homo sapiens
  misc_feature (61)..(62): /note="This region represents a CpG dinucleotide"
  misc_feature (61)..(61): /note="Nucleotide may be methylated to form 5-methylcytosine"
agagaggatgtgatgcagagccagctgatgagagtctacccgagagtgcaggccttctaacgctggcaggagagagtggaaggaagtcacttttttagttcctatggggtcatttttttcct

SEQ ID NO: 28345 - DNA, 122 bp, Homo sapiens
  misc_feature (61)..(62): /note="This region represents a CpG dinucleotide"
  misc_feature (61)..(61): /note="Nucleotide may be methylated to form 5-methylcytosine"
tgtttttgcctccccctaagctggaggtagttggcttaaagtggaagaatcccgaggaggcggggacctggtaaggcccccatcattcagctgccctctcacacctgaagagccacttctct

SEQ ID NO: 28346 - DNA, 122 bp, Homo sapiens
  misc_feature (61)..(62): /note="This region represents a CpG dinucleotide"
  misc_feature (61)..(61): /note="Nucleotide may be methylated to form 5-methylcytosine"
cattggagtggaggagtccaggtggaagttgatggattggacaggtaaagagaagagtcccgcctcctcatgcctatagttgggtatatattaggaaaccttaaattatgtacagagagaga

SEQ ID NO: 28347 - DNA, 122 bp, Homo sapiens
  misc_feature (61)..(62): /note="This region represents a CpG dinucleotide"
  misc_feature (61)..(61): /note="Nucleotide may be methylated to form 5-methylcytosine"
caataacggctcctccctgtgaatgtgaatgtgattgagagccttaggaaagctttcatgcggcatccggtctcttgccatttggccgtccctcatgtgaggacacagcattcctttccacc

SEQ ID NO: 28348 - DNA, 122 bp, Homo sapiens
  misc_feature (61)..(62): /note="This region represents a CpG dinucleotide"
  misc_feature (61)..(61): /note="Nucleotide may be methylated to form 5-methylcytosine"
aaggggatgctagccacgttcactcaggccacgggcgcagccctggctaacagggacatacggccctgctgccacggaggcctccagctccaggtccccaagccagtctctcctgctctgcc

SEQ ID NO: 28349 - DNA, 122 bp, Homo sapiens
  misc_feature (61)..(62): /note="This region represents a CpG dinucleotide"
  misc_feature (61)..(61): /note="Nucleotide may be methylated to form 5-methylcytosine"
actccacgatgactactggaaaaacaactcaacaaactccagcaacagcaggttcgtaatcgctatttggagttggaatttcaacatgtatttatggctctgacatcggatgacaaaataat

SEQ ID NO: 28350 - DNA, 122 bp, Homo sapiens
  misc_feature (61)..(62): /note="This region represents a CpG dinucleotide"
  misc_feature (61)..(61): /note="Nucleotide may be methylated to form 5-methylcytosine"
gggagagaaacatagtctcggagtagggtgggggataaattaaacgcaaacccagcggtgcggcaaaggccttattctgcctctgatctggggaagtttcatattctaatggagagaaacgc

SEQ ID NO: 28351 - DNA, 122 bp, Homo sapiens
  misc_feature (61)..(62): /note="This region represents a CpG dinucleotide"
  misc_feature (61)..(61): /note="Nucleotide may be methylated to form 5-methylcytosine"
aaatgcatgccctgctgagcatgagtcagggtaagggcagacttataggcaatctcattccgggctttctatttttttccatctggcttctcttcctgagtttgttttgcctttcgcttttt

SEQ ID NO: 28352 - DNA, 122 bp, Homo sapiens
  misc_feature (61)..(62): /note="This region represents a CpG dinucleotide"
  misc_feature (61)..(61): /note="Nucleotide may be methylated to form 5-methylcytosine"
ttacaggtgtgagccattacatccggccacaggaagcaattttaacagtgcagttagggccgtccaaaccaagatcagggcaaaagggctagaaggagaagttaggcttgaggaactttcaa

SEQ ID NO: 28353 - DNA, 122 bp, Homo sapiens
  misc_feature (61)..(62): /note="This region represents a CpG dinucleotide"
  misc_feature (61)..(61): /note="Nucleotide may be methylated to form 5-methylcytosine"
tgaattggctgcagagtctgatgtgtccacagccattgaccttttcagacaagccggcctcggcaatcatctctctggaagtgagcggttgaccctcctggctcccctgaattctgtattca

SEQ ID NO: 28354 - DNA, 122 bp, Homo sapiens
  misc_feature (61)..(62): /note="This region represents a CpG dinucleotide"
  misc_feature (61)..(61): /note="Nucleotide may be methylated to form 5-methylcytosine"
gcaaattaaaaaataacaaaaaaagcaacttcttgattctctaaactttatctgagaaaacgaagtgagaaggaaaggctgttgcctagcagatggtttaacacccaagctattcaacatgt

SEQ ID NO: 28355 - DNA, 122 bp, Homo sapiens
  misc_feature (61)..(62): /note="This region represents a CpG dinucleotide"
  misc_feature (61)..(61): /note="Nucleotide may be methylated to form 5-methylcytosine"
gaaatacaacccggaagaggcttattgctttaaagaaatctcattaaagaatctgatcaccggttccatacttagccagagggagagctgctaagccccctgagaaataacaagacgtgctt

SEQ ID NO: 28356 - DNA, 122 bp, Homo sapiens
  misc_feature (61)..(62): /note="This region represents a CpG dinucleotide"
  misc_feature (61)..(61): /note="Nucleotide may be methylated to form 5-methylcytosine"
ggaggaacccccaccctgatttcccttcaatttggccaaaaaattaattcaactctttagcggataaagatgacacactactggaattcagcagtctgggcctgggatacccatcttataaa

SEQ ID NO: 28357 - DNA, 122 bp, Homo sapiens
  misc_feature (61)..(62): /note="This region represents a CpG dinucleotide"
  misc_feature (61)..(61): /note="Nucleotide may be methylated to form 5-methylcytosine"
taaaaaataaattttagactgcttctcggcaatagcacaattttagtccccaaagtggggcgtcattcttattaaaaagaaaacattaagagttcttcaatgtttgccaggttaaatgtgta

SEQ ID NO: 28358 - DNA, 122 bp, Homo sapiens
  misc_feature (61)..(62): /note="This region represents a CpG dinucleotide"
  misc_feature (61)..(61): /note="Nucleotide may be methylated to form 5-methylcytosine"
ttgtttaatggagacttaaaagattgtttgaaagcaaaatattaaattaacctggtgaagcgttttcatgctcattggtgaagtgcctgtaggtgactgtagcttagactgtacattaggta

SEQ ID NO: 28359 - DNA, 122 bp, Homo sapiens
  misc_feature (61)..(62): /note="This region represents a CpG dinucleotide"
  misc_feature (61)..(61): /note="Nucleotide may be methylated to form 5-methylcytosine"
acaagagggacgggggtgtggggaggcaggtagtgagccctcagggacatccacgttgagcgtctggcccagctggcacttggatatttgggtctgcaaatccagatttggttggcattagt

SEQ ID NO: 28360 - DNA, 122 bp, Homo sapiens
  misc_feature (61)..(62): /note="This region represents a CpG dinucleotide"
  misc_feature (61)..(61): /note="Nucleotide may be methylated to form 5-methylcytosine"
ttttgtttttcctttaacaaggtccaaagaaagatgcaaaaggagatcacacccttgccccgctgagccccgtgataacaagtcactccagactaacctgtgtgccagacatttgtgcattg

SEQ ID NO: 28361 - DNA, 122 bp, Homo sapiens
  misc_feature (61)..(62): /note="This region represents a CpG dinucleotide"
  misc_feature (61)..(61): /note="Nucleotide may be methylated to form 5-methylcytosine"
caggagaatggtgcatctggtgggaaaggctgtatcaccaggctgaagaagttggctccacggcttcttaaatagtgcagtgacattaccacagggattgttgcaagttagtctagaagtga

SEQ ID NO: 28362 - DNA, 122 bp, Homo sapiens
  misc_feature (61)..(62): /note="This region represents a CpG dinucleotide"
  misc_feature (61)..(61): /note="Nucleotide may be methylated to form 5-methylcytosine"
cataatccacaaggaatttggcctctggctgcaagattgtgttgctgactgtctcctggacgcctgtaaggctcaccctccacagccttcccatcacatgacgtaggctccctaacacattt

SEQ ID NO: 28363 - DNA, 122 bp, Homo sapiens
  misc_feature (61)..(62): /note="This region represents a CpG dinucleotide"
  misc_feature (61)..(61): /note="Nucleotide may be methylated to form 5-methylcytosine"
cagatttagctaccttcccccgaaagcctcaaagttctgcaaactcacagccaagcaaaacgcagctgcagtcgagccagcctcgaaaggtcttacaactttctgcagtggccagcttgttc

SEQ ID NO: 28364 - DNA, 122 bp, Homo sapiens
  misc_feature (61)..(62): /note="This region represents a CpG dinucleotide"
  misc_feature (61)..(61): /note="Nucleotide may be methylated to form 5-methylcytosine"
ttttctggtaaccaaggcaagtaaggaagactgataatttgcatagatctcattgcctatcgagaattcatgaggagactgccaccttccttaataaagtggagccccaaatgccaagattg

SEQ ID NO: 28365 - DNA, 122 bp, Homo sapiens
  misc_feature (61)..(62): /note="This region represents a CpG dinucleotide"
  misc_feature (61)..(61): /note="Nucleotide may be methylated to form 5-methylcytosine"
ccctcttgggggaacttaatgcccaaaacatcagagccaggcactggacaagcctttgtccgcctcacggctttaaccgtgctactcagcattcttgctgtgaccaagttttaccagggcaa

SEQ ID NO: 28366 - DNA, 122 bp, Homo sapiens
  misc_feature (61)..(62): /note="This region represents a CpG dinucleotide"
  misc_feature (61)..(61): /note="Nucleotide may be methylated to form 5-methylcytosine"
tgggaagatttgtggccactgcataacattctgtgtgatggacctgacagccttggtgtgcgtgaagagcctcagtgggactgtcaggactgtcccgtccttgggacgggagggtggcaggt

SEQ ID NO: 28367 - DNA, 122 bp, Homo sapiens
  misc_feature (61)..(62): /note="This region represents a CpG dinucleotide"
  misc_feature (61)..(61): /note="Nucleotide may be methylated to form 5-methylcytosine"
ctcatgatgattcaccatctggccacctgtcactaaccagaacctcgggctccttagctgcgaagtgagtgaaataatccctgcctcacttgttggatcgaatttcatgatacacgagaaag

SEQ ID NO: 28368 - DNA, 122 bp, Homo sapiens
  misc_feature (61)..(62): /note="This region represents a CpG dinucleotide"
  misc_feature (61)..(61): /note="Nucleotide may be methylated to form 5-methylcytosine"
ataagtcggagtttctccaggctgggtcttaggtcacctgaaagcatcacccatggggagcggcctgcactgcagatgtcccgggccctgcccagatcagtcattctgagggtggggcctgc

SEQ ID NO: 28369 - DNA, 122 bp, Homo sapiens
  misc_feature (61)..(62): /note="This region represents a CpG dinucleotide"
  misc_feature (61)..(61): /note="Nucleotide may be methylated to form 5-methylcytosine"
attaggatatgacctacgacccagaattcagggcaaggctactagttttataggatggttcgttatggattcaaaaggttttaatgggagggccttggaacctgatcttgattaatggggaa

SEQ ID NO: 28370 - DNA, 122 bp, Homo sapiens
  misc_feature (61)..(62): /note="This region represents a CpG dinucleotide"
  misc_feature (61)..(61): /note="Nucleotide may be methylated to form 5-methylcytosine"
tattaaaaacaactttatcttgaattcttacagattttacagagctcttgcttgtgggagcgtaggtccaattgaatagttcattggtgcattcattccttaagtatttggatatactgggc

SEQ ID NO: 28371 - DNA, 122 bp, Homo sapiens
  misc_feature (61)..(62): /note="This region represents a CpG dinucleotide"
  misc_feature (61)..(61): /note="Nucleotide may be methylated to form 5-methylcytosine"
gagagtaacaatagcgctggctgccctgttatttccgaagcctgcctaaattatgccctgcgcagcacagaaagggattttttgtgtatgtgcaggtggattaataaaaaaccattgaaatg

SEQ ID NO: 28372 - DNA, 122 bp, Homo sapiens
  misc_feature (61)..(62): /note="This region represents a CpG dinucleotide"
  misc_feature (61)..(61): /note="Nucleotide may be methylated to form 5-methylcytosine"
aaaattgagacagttacaggttaaataacttgtccatgcccacaagggccaggactcaaacgcaaggtatctgactctaaagcccttcctggttccacatttcacatggctctctgcacaca

SEQ ID NO: 28373 - DNA, 122 bp, Homo sapiens
  misc_feature (61)..(62): /note="This region represents a CpG dinucleotide"
  misc_feature (61)..(61): /note="Nucleotide may be methylated to form 5-methylcytosine"
ctataaaatccacatggtgtcttttcaaaccacagaaaccccaagaaccaaaagttttgccgtatcatattgcataagtcatagggtcacttttatgacaacctgaacctgctggagagccc

SEQ ID NO: 28374 - DNA, 122 bp, Homo sapiens
  misc_feature (61)..(62): /note="This region represents a CpG dinucleotide"
  misc_feature (61)..(61): /note="Nucleotide may be methylated to form 5-methylcytosine"
tgggtgaggcgaaactgctaggtttgttactccttttttttttctaaagaaacatcatttcgaagatgagtttctgcatattcaacccagaagcagacagctcaggaaactgtctgttgaca

SEQ ID NO: 28375 - DNA, 122 bp, Homo sapiens
  misc_feature (61)..(62): /note="This region represents a CpG dinucleotide"
  misc_feature (61)..(61): /note="Nucleotide may be methylated to form 5-methylcytosine"
ctggggtgacaaggaatgcctactaaagaaggtatcgtttaagacatacctggggaatagcggtagtgaaaatagaagctccagaaatgcagggaccatggctgacatgtttaccatgccag

SEQ ID NO: 28376 - DNA, 122 bp, Homo sapiens
  misc_feature (61)..(62): /note="This region represents a CpG dinucleotide"
  misc_feature (61)..(61): /note="Nucleotide may be methylated to form 5-methylcytosine"
aaaggcacttaagcaggagagtgacaggatcagatgggcatttcagcacaattgttctggcggcagtgaggattagagaaaaggaggcaggaaactatttgtctctgtctcgggagaccagg

SEQ ID NO: 28377 - DNA, 122 bp, Homo sapiens
  misc_feature (61)..(62): /note="This region represents a CpG dinucleotide"
  misc_feature (61)..(61): /note="Nucleotide may be methylated to form 5-methylcytosine"
tgaacattaatctaaatatctgttcactgtggggaaacatttgagaggaaccatcattgacggagatgaaactagaaattgtgtgaagaggcctgagtctgaccaggtgtgattttagaaag

SEQ ID NO: 28378 - DNA, 122 bp, Homo sapiens
  misc_feature (61)..(62): /note="This region represents a CpG dinucleotide"
  misc_feature (61)..(61): /note="Nucleotide may be methylated to form 5-methylcytosine"
tcatcagaagcagtagcacccccactgagaaaaacagtacattcaactctgatggtattacgggcataagtgacctcaccaaataggtgctttatctagataggtctatgtgatactcccta

SEQ ID NO: 28379 - DNA, 122 bp, Homo sapiens
  misc_feature (61)..(62): /note="This region represents a CpG dinucleotide"
  misc_feature (61)..(61): /note="Nucleotide may be methylated to form 5-methylcytosine"
gcccaggccctgaaacagacagattctcaccccagcttgggctcatgggaagtgtgtggccgtgagcaaatgacttaacctctctgaacttgagtttactcagctgtgaaatggtcattgta

SEQ ID NO: 28380 - DNA, 122 bp, Homo sapiens
  misc_feature (61)..(62): /note="This region represents a CpG dinucleotide"
  misc_feature (61)..(61): /note="Nucleotide may be methylated to form 5-methylcytosine"
aggttaaggaagcttgccatttcccttttcagagcagtcctttcaacaataccaagaattcgcactttggtagataatgacaagaaatacgacagcccagccgttagtaaacaagcaaatca

SEQ ID NO: 28381 - DNA, 122 bp, Homo sapiens
  misc_feature (61)..(62): /note="This region represents a CpG dinucleotide"
  misc_feature (61)..(61): /note="Nucleotide may be methylated to form 5-methylcytosine"
tggacaccaaagactcaggtgagcttccctagtgagcaatactctgtgtatactgtcacgcgttgtggccaagagaaggtaacactgtctatgactccaccagcaatgatggccagaagctc

SEQ ID NO: 28382 - DNA, 122 bp, Homo sapiens
  misc_feature (61)..(62): /note="This region represents a CpG dinucleotide"
  misc_feature (61)..(61): /note="Nucleotide may be methylated to form 5-methylcytosine"
aaaataaaataactgcacctcatgggattatctgatgaaatgtgtgtatcacttgtcaagcgggaagagagatgattcaccaaacacagtgaaacccactgaggttgaaagatgtttgagac

SEQ ID NO: 28383 - DNA, 122 bp, Homo sapiens
  misc_feature (61)..(62): /note="This region represents a CpG dinucleotide"
  misc_feature (61)..(61): /note="Nucleotide may be methylated to form 5-methylcytosine"
tggctctcagccagggagttccccatccagctgctgtgtgtgcatcacaggtctaaagagcgcccacggcctataacactgatcagtctgagtctcagtccatcctgccatgggttgcagac

SEQ ID NO: 28384 - DNA, 122 bp, Homo sapiens
  misc_feature (61)..(62): /note="This region represents a CpG dinucleotide"
  misc_feature (61)..(61): /note="Nucleotide may be methylated to form 5-methylcytosine"
catcatccctccctattggtgttttgctatagtcatcatgtttacacaaccccatccttccgtgagtgtgctgggaaaagctatctcagcaacatatacccagcatctcctgttctctccta

SEQ ID NO: 28385 - DNA, 122 bp, Homo sapiens
  misc_feature (61)..(62): /note="This region represents a CpG dinucleotide"
  misc_feature (61)..(61): /note="Nucleotide may be methylated to form 5-methylcytosine"
catgccatcatgcccggctaagtgagtaggatattaattatttctgcagcccaagttatgcggctgactcataaggagatgaaagcattgttcattgcaactagcaagtgaaggatctgacg

SEQ ID NO: 28386 - DNA, 122 bp, Homo sapiens
  misc_feature (61)..(62): /note="This region represents a CpG dinucleotide"
  misc_feature (61)..(61): /note="Nucleotide may be methylated to form 5-methylcytosine"
tgccagggatccagtagtggaccagaaagacaagtctctgtcttccagagcttacagtggcgtgtagcactgtccgatagaactttctgtgacaatggaagtgtttggtatctgtgtcatct

SEQ ID NO: 28387 - DNA, 122 bp, Homo sapiens
  misc_feature (61)..(62): /note="This region represents a CpG dinucleotide"
  misc_feature (61)..(61): /note="Nucleotide may be methylated to form 5-methylcytosine"
gattggaaatagtaagttaaagcacctggcacagatgtttaccttgtactagtagctatgcggcagctagtattgctcaaactatgtaggaatggccatcacatgtctcgtttcagttcact

SEQ ID NO: 28388 - DNA, 122 bp, Homo sapiens
  misc_feature (61)..(62): /note="This region represents a CpG dinucleotide"
  misc_feature (61)..(61): /note="Nucleotide may be methylated to form 5-methylcytosine"
caaataaccggcagttgagggagccttggtaagggggaaatagggactcacatcactttacgtttcaagatctgcagggaagtgctaggtggcaggagtcctctgaacttcccagtgcacct

SEQ ID NO: 28389 - DNA, 122 bp, Homo sapiens
  misc_feature (61)..(62): /note="This region represents a CpG dinucleotide"
  misc_feature (61)..(61): /note="Nucleotide may be methylated to form 5-methylcytosine"
ggcccctggagagaagagttaatgggatcaaggctggctcatgagttatcagctactccacgaagctgagtctcatagattaatgcagaactggcaagcttaaagtcctggggaaaaggctg

SEQ ID NO: 28390 - DNA, 122 bp, Homo sapiens
  misc_feature (61)..(62): /note="This region represents a CpG dinucleotide"
  misc_feature (61)..(61): /note="Nucleotide may be methylated to form 5-methylcytosine"
aagaggaaggaacggggttcttagcctctctggccttggtgcacttgtctgctcccaggacgtttctcgatggctctccccgaggactgggagtacccagcctggtgcctccaccctgtctt

SEQ ID NO: 28391 - DNA, 122 bp, Homo sapiens
  misc_feature (61)..(62): /note="This region represents a CpG dinucleotide"
  misc_feature (61)..(61): /note="Nucleotide may be methylated to form 5-methylcytosine"
ttcattcttgatttcctttttatcccccttcctctttgcacccgactgctataaaaagcacgcctcactcccacttggctcgacaagcagccgccctggaaggagaggcagctgcaaggaga

SEQ ID NO: 28392 - DNA, 122 bp, Homo sapiens
  misc_feature (61)..(62): /note="This region represents a CpG dinucleotide"
  misc_feature (61)..(61): /note="Nucleotide may be methylated to form 5-methylcytosine"
gtgcacccagagctgacccgcagggacagccccggctgggtcatggctgagctccatggccggccaagtcactgcacatctccaagctgtctgctcatcagggaaatgcagattttagacta

SEQ ID NO: 28393 - DNA, 122 bp, Homo sapiens
  misc_feature (61)..(62): /note="This region represents a CpG dinucleotide"
  misc_feature (61)..(61): /note="Nucleotide may be methylated to form 5-methylcytosine"
ggagaggcagagtgtccttcagtcttgacgcctgggagctgtggatgcctcattgttgctcgtcttgcgacataaaataacagcatgctagtggccaaaaggcatgaagtgttcaaacttat

SEQ ID NO: 28394 - DNA, 122 bp, Homo sapiens
  misc_feature (61)..(62): /note="This region represents a CpG dinucleotide"
  misc_feature (61)..(61): /note="Nucleotide may be methylated to form 5-methylcytosine"
ccattttcaatgccttggagttaagcaatcaacatcccttctttaataaaccatctgtgacgactggaagcccagactggaagcctccatgccaaccttgccatgtccactcttgatttccg

SEQ ID NO: 28395 - DNA, 122 bp, Homo sapiens
  misc_feature (61)..(62): /note="This region represents a CpG dinucleotide"
  misc_feature (61)..(61): /note="Nucleotide may be methylated to form 5-methylcytosine"
cctggcacggagcggggggtgcataacacgccccgggacagttacgggcgctagccacgtcggcgatggccaaataataaactaacagtaatattatagtaacagcatccgaaggatgagat

SEQ ID NO: 28396 - DNA, 122 bp, Homo sapiens
  misc_feature (61)..(62): /note="This region represents a CpG dinucleotide"
  misc_feature (61)..(61): /note="Nucleotide may be methylated to form 5-methylcytosine"
accatacagctaggtgtgcagtaggctataggtttgtgtaagtatactctatgatgtttgcgcaatgatgaaattgcctaaggacacattactcagaaactatccctgttgttatagtagca

SEQ ID NO: 28397 - DNA, 122 bp, Homo sapiens
  misc_feature (61)..(62): /note="This region represents a CpG dinucleotide"
  misc_feature (61)..(61): /note="Nucleotide may be methylated to form 5-methylcytosine"
gaggcactgccctcctcaggtctgcccaagcagcttgtagctagcactgggccccgtgcgcgcccctgccggccgctggccctgccctctctcctctgcaggcacggggcctgtgctctctg

SEQ ID NO: 28398 - DNA, 122 bp, Homo sapiens
  misc_feature (61)..(62): /note="This region represents a CpG dinucleotide"
  misc_feature (61)..(61): /note="Nucleotide may be methylated to form 5-methylcytosine"
gcagcttcagaacattgacaaaaacaccacgacaatctttttgcaaatctgcttagcagacggatggcctgaatggtcagccaaaccaaacagacacaattaaaagggaatgggttctcagc

SEQ ID NO: 28399 - DNA, 122 bp, Homo sapiens
  misc_feature (61)..(62): /note="This region represents a CpG dinucleotide"
  misc_feature (61)..(61): /note="Nucleotide may be methylated to form 5-methylcytosine"
gattactgcagatattctagctgggtttggatttctcaccctgctccttggtcttgactgcgtgaaattcctccctgatgagccgtacattaaagtccgcatctgctttgttgctggagcca

SEQ ID NO: 28400 - DNA, 122 bp, Homo sapiens
  misc_feature (61)..(62): /note="This region represents a CpG dinucleotide"
  misc_feature (61)..(61): /note="Nucleotide may be methylated to form 5-methylcytosine"
ttgttttaaacacgggttgatagatggacagaacatgatacagcaagtataggaaaatggcgatggtagacacgtgggtgtttactgtagaattctttcaacttttctgtatgtttgaaaat

SEQ ID NO: 28401 - DNA, 122 bp, Homo sapiens
  misc_feature (61)..(62): /note="This region represents a CpG dinucleotide"
  misc_feature (61)..(61): /note="Nucleotide may be methylated to form 5-methylcytosine"
ccatttgcccttcccagtcaacactgcaccctgccctgcatggcctgaggggaagctgtacgttgcatcccagagaaactgccttgatgaaactgctccaactactcctcttagtcactgct

SEQ ID NO: 28402 - DNA, 122 bp, Homo sapiens
  misc_feature (61)..(62): /note="This region represents a CpG dinucleotide"
  misc_feature (61)..(61): /note="Nucleotide may be methylated to form 5-methylcytosine"
tgaagtggcgggtgtggtccaggatgtccagaggcaaggagagagctggacaggctaaggcggtgccctgcagtggtcaagggcaggactttaatctcagctctaggcggggtacagtggct

SEQ ID NO: 28403 - DNA, 122 bp, Homo sapiens
  misc_feature (61)..(62): /note="This region represents a CpG dinucleotide"
  misc_feature (61)..(61): /note="Nucleotide may be methylated to form 5-methylcytosine"
caggtagcctcatggctgcaacctgtgagattagcaacatttttagcaactacttcagtgcgatgtacagctcggaggactccaccctggcctctgttccccctgctgccacctttggggcc

SEQ ID NO: 28404 - DNA, 122 bp, Homo sapiens
  misc_feature (61)..(62): /note="This region represents a CpG dinucleotide"
  misc_feature (61)..(61): /note="Nucleotide may be methylated to form 5-methylcytosine"
cacggctgaggtcacctagggagtgcttgtggatgaacagggaagaggcccaagactggacgtggaggtctccaatgtttagagtcagggaaatgaaggacaccaacaaaactcacctaaga

SEQ ID NO: 28405 - DNA, 122 bp, Homo sapiens
  misc_feature (61)..(62): /note="This region represents a CpG dinucleotide"
  misc_feature (61)..(61): /note="Nucleotide may be methylated to form 5-methylcytosine"
taggcgggaaatttaaggatgttaagaggctttgctttcaattacaaaagcccatctgaacgcagccttcatgggctgtggttgaggaaattattaagaactgaaagacatgacacttgtct

SEQ ID NO: 28406 - DNA, 122 bp, Homo sapiens
  misc_feature (61)..(62): /note="This region represents a CpG dinucleotide"
  misc_feature (61)..(61): /note="Nucleotide may be methylated to form 5-methylcytosine"
gacaggaagaaggcagccagggcaggggtgggggtcctcacagccagggcagccccagcgcgttggctccaggagcccgggtgggggccgaccgttggggtgcccctccctgtcctcggcct

SEQ ID NO: 28407 - DNA, 122 bp, Homo sapiens
  misc_feature (61)..(62): /note="This region represents a CpG dinucleotide"
  misc_feature (61)..(61): /note="Nucleotide may be methylated to form 5-methylcytosine"
caggaaagggcaaggctgccacagcgtgggtgctgggtggggtcaacccctttgagcctccgtgacatcatctgtcataatttgtccctgaggatccaggcctgggtggctccttctctcat

SEQ ID NO: 28408 - DNA, 122 bp, Homo sapiens
  misc_feature (61)..(62): /note="This region represents a CpG dinucleotide"
  misc_feature (61)..(61): /note="Nucleotide may be methylated to form 5-methylcytosine"
ttaattagaaaaaggatttgtgaggctagtcttaagctgcagcgaatctggtgtgctttacgtgtttttctgtattgttccatcataaagaggggtaccttatgatggaacacaggcttagg

SEQ ID NO: 28409 - DNA, 122 bp, Homo sapiens
  misc_feature (61)..(62): /note="This region represents a CpG dinucleotide"
  misc_feature (61)..(61): /note="Nucleotide may be methylated to form 5-methylcytosine"
tttatcactctagttgctacattgggcacaatgccacaggacacaaatgggggtactgaacgtaagtctgagtgttggcccaatagtacctgtccagaagcagcctgggatccatgatccat

SEQ ID NO: 28410 - DNA, 122 bp, Homo sapiens
  misc_feature (61)..(62): /note="This region represents a CpG dinucleotide"
  misc_feature (61)..(61): /note="Nucleotide may be methylated to form 5-methylcytosine"
tggtgcgctctgcatcacagacattgtgagcttgtgtaccttgccgtgcacactaaattgcgtctgtttgtttctgtgccttcagttgggtggtgtatgtttgtgtgtatatgctttgtata

SEQ ID NO: 28411 - DNA, 122 bp, Homo sapiens
  misc_feature (61)..(62): /note="This region represents a CpG dinucleotide"
  misc_feature (61)..(61): /note="Nucleotide may be methylated to form 5-methylcytosine"
tggtgaaatgggtcaacgctgtttgccaggcagcctatgaaactgcaagcaggctactggcgtagtgatagcagcacaggccaaagcagtccacaatctatagctgaatctaggtcaccagg

SEQ ID NO: 28412 - DNA, 122 bp, Homo sapiens
  misc_feature (61)..(62): /note="This region represents a CpG dinucleotide"
  misc_feature (61)..(61): /note="Nucleotide may be methylated to form 5-methylcytosine"
cacttattgacactaatccatcttctaacagttgctggatactggcaagtatatacctcacgtatgtctcctacatgaaatgtaggaggtgtgtttttataacacaaatttgcaaatgttat

SEQ ID NO: 28413 - DNA, 122 bp, Homo sapiens
  misc_feature (61)..(62): /note="This region represents a CpG dinucleotide"
  misc_feature (61)..(61): /note="Nucleotide may be methylated to form 5-methylcytosine"
agggacatatgcccctggggtagcccgctgggggtaagctctgaggttgccccacccccacgcctgcccagcacatgtctgtgcacccacaagcgcatgcgctgacacacacatggtcctgg

SEQ ID NO: 28414 - DNA, 122 bp, Homo sapiens
  misc_feature (61)..(62): /note="This region represents a CpG dinucleotide"
  misc_feature (61)..(61): /note="Nucleotide may be methylated to form 5-methylcytosine"
gaattctgcaaaacaagaaaaaaatagatctgtgtgctacactgaaaactgaacaaggcacgtcgtaagtcagtcacacagaaggcgcagctcagggcgataccaactagaaaagtaacttt

SEQ ID NO: 28415 - DNA, 122 bp, Homo sapiens
  misc_feature (61)..(62): /note="This region represents a CpG dinucleotide"
  misc_feature (61)..(61): /note="Nucleotide may be methylated to form 5-methylcytosine"
aaggaattcgttttcttagaagctgtgcctgtcactctgctcagaaacagtccaagcagccgttccaagtgtggccttcagcccatgccaaacttagatcaactgcaggcttggagctttct

SEQ ID NO: 28416 - DNA, 122 bp, Homo sapiens
  misc_feature (61)..(62): /note="This region represents a CpG dinucleotide"
  misc_feature (61)..(61): /note="Nucleotide may be methylated to form 5-methylcytosine"
tgaaagagagaaacaggcactaaacactaagctttgtgtgaagctgtgactaaggaactgcggttagctgtcttgttccccaagtgagctcataacctgccatgggcaagttttatatcagg

SEQ ID NO: 28417 - DNA, 122 bp, Homo sapiens
  misc_feature (61)..(62): /note="This region represents a CpG dinucleotide"
  misc_feature (61)..(61): /note="Nucleotide may be methylated to form 5-methylcytosine"
aaatctccatcctccatctccactcttggaaaatgcagctgccctgcacacccacagccccgcccccgccccaccacggaggcctatggacgccaccacgacaccacatggcagttactcgg

SEQ ID NO: 28418 - DNA, 122 bp, Homo sapiens
  misc_feature (61)..(62): /note="This region represents a CpG dinucleotide"
  misc_feature (61)..(61): /note="Nucleotide may be methylated to form 5-methylcytosine"
agagaaatgaaactgcagatgcaagaagtcagggcgattctaccccagagcaggacgtgtcgagctacctgtgcaaagccccgagcgtggggtctctccttcaaacgcgagatacttactgc

SEQ ID NO: 28419 - DNA, 122 bp, Homo sapiens
  misc_feature (61)..(62): /note="This region represents a CpG dinucleotide"
  misc_feature (61)..(61): /note="Nucleotide may be methylated to form 5-methylcytosine"
aaagccaattcattgtcctacagaaattctgttctactggaagcatcagagctttacaaacgtaaaaactaaatacctgacttcggtatcctgggcacagtcaatgtagagagcagatgaaa

SEQ ID NO: 28420 - DNA, 122 bp, Homo sapiens
  misc_feature (61)..(62): /note="This region represents a CpG dinucleotide"
  misc_feature (61)..(61): /note="Nucleotide may be methylated to form 5-methylcytosine"
tggttttgcaatgctggtgaagtatgcagtactgagttcacaagttcacatcacagaatacgcagaccaagaggccttaatgagagacagaaggactataagctagccagaaaacttgcctc

SEQ ID NO: 28421 - DNA, 122 bp, Homo sapiens
  misc_feature (61)..(62): /note="This region represents a CpG dinucleotide"
  misc_feature (61)..(61): /note="Nucleotide may be methylated to form 5-methylcytosine"
ttagtttgcttagtaagaaaggcaatatttttgttgaatttcacattttctaccaagtaacgaattaacctttttgaaatcgcagaggagatcacagcaggaaatgaagccatatcctgtac

SEQ ID NO: 28422 - DNA, 122 bp, Homo sapiens
  misc_feature (61)..(62): /note="This region represents a CpG dinucleotide"
  misc_feature (61)..(61): /note="Nucleotide may be methylated to form 5-methylcytosine"
tgctcagtttttccaaggagatctgacagtgtgtcttacaagtagtgggcacagtctgcacgcatcagaatgagaaacttcaccctaatctcacaaagacatccatcacaaaggaacaagct

SEQ ID NO: 28423 - DNA, 122 bp, Homo sapiens
  misc_feature (61)..(62): /note="This region represents a CpG dinucleotide"
  misc_feature (61)..(61): /note="Nucleotide may be methylated to form 5-methylcytosine"
caatgtggcatatccgtacaatgcactgttcacgttactcagccgtgaaaagaaatgaagcgctgacatgccacaacatgggtgaaccttgagtgaaagaagccaggttcaaaaggctacat

SEQ ID NO: 28424 - DNA, 122 bp, Homo sapiens
  misc_feature (61)..(62): /note="This region represents a CpG dinucleotide"
  misc_feature (61)..(61): /note="Nucleotide may be methylated to form 5-methylcytosine"
gggattctaaacggcctagctgcaattcagctctaaacattgtactatcctgtggccaggcgccccaaggaatctgaaggattcagacgggtgaagtgataaccataataatgccttccatt

SEQ ID NO: 28425 - DNA, 122 bp, Homo sapiens
  misc_feature (61)..(62): /note="This region represents a CpG dinucleotide"
  misc_feature (61)..(61): /note="Nucleotide may be methylated to form 5-methylcytosine"
cctggcaagaaattgtgtcctgtgtctcgtggcccagcctggcactcgccctcctcgccccgctcagctttagggggcaggaagcagtgcagctccttaacccacttcctgttagagcatct

SEQ ID NO: 28426 - DNA, 122 bp, Homo sapiens
  misc_feature (61)..(62): /note="This region represents a CpG dinucleotide"
  misc_feature (61)..(61): /note="Nucleotide may be methylated to form 5-methylcytosine"
gtgttttgtgctccaagaagagtgagacataagagttttcaataatatgttgcagcttaacgagaatgtaggagaaacctgttataccagttggagatcagacttgaaaaaatggatttcct

SEQ ID NO: 28427 - DNA, 122 bp, Homo sapiens
  misc_feature (61)..(62): /note="This region represents a CpG dinucleotide"
  misc_feature (61)..(61): /note="Nucleotide may be methylated to form 5-methylcytosine"
tgctgagtccttttgtaaagtgaagacatcctttagaatgcagtggactgtgtagcatagcggttaagagctctgacttgaggcttaagtgctacttactggctgtctgaacttgggccatt

SEQ ID NO: 28428 - DNA, 122 bp, Homo sapiens
  misc_feature (61)..(62): /note="This region represents a CpG dinucleotide"
  misc_feature (61)..(61): /note="Nucleotide may be methylated to form 5-methylcytosine"
ataagatgacaaacttaactgataaatgttaagtgtgttctgacagctccactggaaaaccgttcccttgtctttgtccctcccctggggcctctctactccctgagacacaacactattga

SEQ ID NO: 28429 - DNA, 122 bp, Homo sapiens
  misc_feature (61)..(62): /note="This region represents a CpG dinucleotide"
  misc_feature (61)..(61): /note="Nucleotide may be methylated to form 5-methylcytosine"
attatctcatgtaagtcctgcaacaactattaagtaggcccattttatggactgaaaaagcgaggcacagagtatttgcccaaggtctgagtcactgaagtatgataatgtgtgaagtgaac

SEQ ID NO: 28430 - DNA, 122 bp, Homo sapiens
  misc_feature (61)..(62): /note="This region represents a CpG dinucleotide"
  misc_feature (61)..(61): /note="Nucleotide may be methylated to form 5-methylcytosine"
caggggccatttctgggtgggggaagaggcaggtaggaaaagccaagtgcatcgggctcccgggcctcagccagagcccaggcttagtggcacctgaagccagccctggtgctgctgcactg

SEQ ID NO: 28431 - DNA, 122 bp, Homo sapiens
  misc_feature (61)..(62): /note="This region represents a CpG dinucleotide"
  misc_feature (61)..(61): /note="Nucleotide may be methylated to form 5-methylcytosine"
cataaaagtcttatctacagtgaaaaaaatgaatcatataagagacggcttcagaatgtacgtaaggtgtgctttgactagccaggaaaagaacctctccctgtgtgcaaacagaatctttt

SEQ ID NO: 28432 - DNA, 122 bp, Homo sapiens
  misc_feature (61)..(62): /note="This region represents a CpG dinucleotide"
  misc_feature (61)..(61): /note="Nucleotide may be methylated to form 5-methylcytosine"
cagactcccaaggcctcccatgcagggcagggactccctccagcggtacgtaacccaacacgtgagaaaatgtcacccagggaacagagagaccagattaacttgataacatctgaaacccc

SEQ ID NO: 28433 - DNA, 122 bp, Homo sapiens
  misc_feature (61)..(62): /note="This region represents a CpG dinucleotide"
  misc_feature (61)..(61): /note="Nucleotide may be methylated to form 5-methylcytosine"
tgacctcgtgatccgcctgccgcggcctcccaaagtgctgggattacaggcatgaaccaccgtgcctggcagagcttgtagttttctgatttatgtgtgtgtgtgttttttaacttggaaaa

SEQ ID NO: 28434 - DNA, 122 bp, Homo sapiens
  misc_feature (61)..(62): /note="This region represents a CpG dinucleotide"
  misc_feature (61)..(61): /note="Nucleotide may be methylated to form 5-methylcytosine"
atgtaaataactaaaatttacacaattcatttgtgcattgtgcagggttatgggtgtgtgcgcacacacatgcacgctatagaagaggtcagtgagcagtcagttgtcagggctttcaggaa

SEQ ID NO: 28435 - DNA, 122 bp, Homo sapiens
  misc_feature (61)..(62): /note="This region represents a CpG dinucleotide"
  misc_feature (61)..(61): /note="Nucleotide may be methylated to form 5-methylcytosine"
ggactggtttttctggaggaaaaatactgggagcccatttgctgaatgtgcaaaatgacacgctctgccaacaggtgctccagtgacaaaggagcctcagcccgagagtgggtcacacaaga

SEQ ID NO: 28436 - DNA, 122 bp, Homo sapiens
  misc_feature (61)..(62): /note="This region represents a CpG dinucleotide"
  misc_feature (61)..(61): /note="Nucleotide may be methylated to form 5-methylcytosine"
gacttggggtgagcaatgctgaaatcaccatgaactgctctcagggtctcaggaaaagggcgaggcaagagcaactaggcctatggccctcaattgcctgaattatgcaatactctgattta

SEQ ID NO: 28437 - DNA, 122 bp, Homo sapiens
  misc_feature (61)..(62): /note="This region represents a CpG dinucleotide"
  misc_feature (61)..(61): /note="Nucleotide may be methylated to form 5-methylcytosine"
tagacattctaattgcacaagacaccaatgtgagtcagagttggagctgaacactgggtacgtgtttctagggtgatacagatgaggattaatttattttggtattcattagtgcttaaaaa

SEQ ID NO: 28438 - DNA, 122 bp, Homo sapiens
  misc_feature (61)..(62): /note="This region represents a CpG dinucleotide"
  misc_feature (61)..(61): /note="Nucleotide may be methylated to form 5-methylcytosine"
tctcttccagctgacagccaaaagttgagttggttggctaacacctggatatggcccaggcgtgcaggaagcatatctacctctggctggtgctaaaggccctaaggccgggaagcagggag

SEQ ID NO: 28439 - DNA, 122 bp, Homo sapiens
  misc_feature (61)..(62): /note="This region represents a CpG dinucleotide"
  misc_feature (61)..(61): /note="Nucleotide may be methylated to form 5-methylcytosine"
caagcacctggaggcggaacctgtgtggccggctacagggtggtcctgtgtatgtgttaccgccttattgttccaaagaacagtctttttcaagtgacaggtagaagacgccccaataacga

SEQ ID NO: 28440 - DNA, 122 bp, Homo sapiens
  misc_feature (61)..(62): /note="This region represents a CpG dinucleotide"
  misc_feature (61)..(61): /note="Nucleotide may be methylated to form 5-methylcytosine"
ttgtttgtttgttttgggtagcccaaagcaacacttttctacagaggcagccattctgcacgcacaataacctggtgaacaatgccagctttctattaataaatgaactgccagttcagaat

SEQ ID NO: 28441 - DNA, 122 bp, Homo sapiens
  misc_feature (61)..(62): /note="This region represents a CpG dinucleotide"
  misc_feature (61)..(61): /note="Nucleotide may be methylated to form 5-methylcytosine"
gtactagaaactaattctcactccactccacagaaacagggctcagcaggctggagtgatcgacaaggcaggtgtagacatgtccaagttcaggagtcatttctagcatcaccacagtctga

SEQ ID NO: 28442 - DNA, 122 bp, Homo sapiens
  misc_feature (61)..(62): /note="This region represents a CpG dinucleotide"
  misc_feature (61)..(61): /note="Nucleotide may be methylated to form 5-methylcytosine"
tttgcctctttcttggaacacaggatagaggtcaggcttctgattccggagtcagatggccgagttcagtcttggccatgccactcctagctagatgaccttgggcaaatcacgtgacctcc

SEQ ID NO: 28443 - DNA, 122 bp, Homo sapiens
  misc_feature (61)..(62): /note="This region represents a CpG dinucleotide"
  misc_feature (61)..(61): /note="Nucleotide may be methylated to form 5-methylcytosine"
agacagagtgcagggagggagcaggttgacgtgggcatcgggaacccaacccaagccaaccgcccccacccctaccccagcctcctgccaccctctccgaggagtctgggtttaattttctg

SEQ ID NO: 28444 - DNA, 122 bp, Homo sapiens
  misc_feature (61)..(62): /note="This region represents a CpG dinucleotide"
  misc_feature (61)..(61): /note="Nucleotide may be methylated to form 5-methylcytosine"
cgcagcagggctgggcacgccaccttcacgagagtaagagagaagcaacgggcttggacgcggggactgggcacgccaccttctccagccccagagccccactgtggagagaaaaggggctg

SEQ ID NO: 28445 - DNA, 122 bp, Homo sapiens
  misc_feature (61)..(62): /note="This region represents a CpG dinucleotide"
  misc_feature (61)..(61): /note="Nucleotide may be methylated to form 5-methylcytosine"
attcccttaaagtggtcaagtctgggttaagggcttttagggcacattaactcactatgtcgtcttgagcaactctgcaaggggtgggagcagagggggccccctttggcccagctctctac

SEQ ID NO: 28446 - DNA, 122 bp, Homo sapiens
  misc_feature (61)..(62): /note="This region represents a CpG dinucleotide"
  misc_feature (61)..(61): /note="Nucleotide may be methylated to form 5-methylcytosine"
taagtacctgctgggcttcccaggacagcagctgacagcacaggcttggcaggtaggaggcgtccttgggcttcactctcatgcatgatgtcaccttccagcgacacatggaagtggatata

SEQ ID NO: 28447 - DNA, 122 bp, Homo sapiens
  misc_feature (61)..(62): /note="This region represents a CpG dinucleotide"
  misc_feature (61)..(61): /note="Nucleotide may be methylated to form 5-methylcytosine"
gtgaaagaggccacatgtgagagaatagagagagcaaaatgacagctttgcttggcagaacgtgaccatgcacagcattgggagacacagtctgatgaagcattttttccaatttgtaaata

SEQ ID NO: 28448 - DNA, 122 bp, Homo sapiens
  misc_feature (61)..(62): /note="This region represents a CpG dinucleotide"
  misc_feature (61)..(61): /note="Nucleotide may be methylated to form 5-methylcytosine"
atgacttgggatttgatgggagctcagggagccaaggaaggcaaagagaagcaggagccccgccacacacattgcaagtggtggattgctggctgtggttttcctggaaggctcttaaatgg

SEQ ID NO: 28449 - DNA, 122 bp, Homo sapiens
  misc_feature (61)..(62): /note="This region represents a CpG dinucleotide"
  misc_feature (61)..(61): /note="Nucleotide may be methylated to form 5-methylcytosine"
aaaggagtcttcctttaggtgaatgaggcactgtcggagtcactctgagttctgagtcaccgttcagtctgggctggttggaagaaattgggttgaatctcagcattcaggtttgacatgtt

SEQ ID NO: 28450 - DNA, 122 bp, Homo sapiens
  misc_feature (61)..(62): /note="This region represents a CpG dinucleotide"
  misc_feature (61)..(61): /note="Nucleotide may be methylated to form 5-methylcytosine"
tgcaaccttctttttttcccttgctacagtatattgcacaccttgccaaacattagttctcgttagattagaccacaaagaagtacacatttaagaggagacacacagaggacctcgcagag

SEQ ID NO: 28451 - DNA, 122 bp, Homo sapiens
  misc_feature (61)..(62): /note="This region represents a CpG dinucleotide"
  misc_feature (61)..(61): /note="Nucleotide may be methylated to form 5-methylcytosine"
tggccacttctaactattgaagagctaaggtaaaaagtatactccttgagctagaaatagcgaataagattggggaactctaggagaaggtaacattgacctatctatttgattgctggtga

SEQ ID NO: 28452 - DNA, 122 bp, Homo sapiens
  misc_feature (61)..(62): /note="This region represents a CpG dinucleotide"
  misc_feature (61)..(61): /note="Nucleotide may be methylated to form 5-methylcytosine"
ggccagggagtgactgactgggcaggtgtcctccctcttccctgtctctgccctctttggcgcctcctctcgttctttctactctgagtgttcagtgctctcaagttttctcagcctcctcc

SEQ ID NO: 28453 - DNA, 122 bp, Homo sapiens
  misc_feature (61)..(62): /note="This region represents a CpG dinucleotide"
  misc_feature (61)..(61): /note="Nucleotide may be methylated to form 5-methylcytosine"
cattgaatatttcactaccttgatgtcttagcaggctgcaatgggagtttctcctgcagacgttgaaggcataagctgccatgttgtgacaagcctgtgagatgccacatgggaagaagctg

SEQ ID NO: 28454 - DNA, 122 bp, Homo sapiens
  misc_feature (61)..(62): /note="This region represents a CpG dinucleotide"
  misc_feature (61)..(61): /note="Nucleotide may be methylated to form 5-methylcytosine"
tcattttcctccctgcaatgcttctgaaatagctaattggatgattcattcctatggatgcgtctgccccattcagaaactgtttatggcagtgaacaaaactaactctctaatgtgtggag

SEQ ID NO: 28455 - DNA, 122 bp, Homo sapiens
  misc_feature (61)..(62): /note="This region represents a CpG dinucleotide"
  misc_feature (61)..(61): /note="Nucleotide may be methylated to form 5-methylcytosine"
aacctacctgagcgctgtagctgctgttgcaccattgccagatgcagaggtgttccaggacgagggtttaagagagggtgactagcagcaggtaaagggtaaaagggctgacccaggatggg

SEQ ID NO: 28456 - DNA, 122 bp, Homo sapiens
  misc_feature (61)..(62): /note="This region represents a CpG dinucleotide"
  misc_feature (61)..(61): /note="Nucleotide may be methylated to form 5-methylcytosine"
tgagccaccgcgccaggcctgagtaatcctaatcacaggattttaaaaagaaacttcctgcgccacccattaaacaatatctcctaccaatttggtagtaaatattttgctaatagtaccta

SEQ ID NO: 28457 - DNA, 122 bp, Homo sapiens
  misc_feature (61)..(62): /note="This region represents a CpG dinucleotide"
  misc_feature (61)..(61): /note="Nucleotide may be methylated to form 5-methylcytosine"
gttttgttgctggtgagcaggtacggattcttgacttcaccgcacaaaagaacttgagagcgagcctaaagtaagagtaagcaaagtttatttattgcaaagcaaaagtacactctgagagg

SEQ ID NO: 28458 - DNA, 122 bp, Homo sapiens
  misc_feature (61)..(62): /note="This region represents a CpG dinucleotide"
  misc_feature (61)..(61): /note="Nucleotide may be methylated to form 5-methylcytosine"
taaggtcttatcattgtgtgaacatttctcactcactttattgcatctctgtgattacttcgatactatcttgagtcagcactttctactttaagttatacagccaaggtgtgtcatggctg

SEQ ID NO: 28459 - DNA, 122 bp, Homo sapiens
  misc_feature (61)..(62): /note="This region represents a CpG dinucleotide"
  misc_feature (61)..(61): /note="Nucleotide may be methylated to form 5-methylcytosine"
cttacaatgaaatggactaaatccaatctgccttatattcctgtgtccactaaccaccatcggaaatccaacttccttgttatctatgatgattcaagcctatcatgccccacaaaaactac

SEQ ID NO: 28460 - DNA, 122 bp, Homo sapiens
  misc_feature (61)..(62): /note="This region represents a CpG dinucleotide"
  misc_feature (61)..(61): /note="Nucleotide may be methylated to form 5-methylcytosine"
tctgtttagagaaaagaggaagcagtgtgggatcctgaaatgactgaaacaatcttaaatcgactgaaaatattttggtgcttgagataaatttatgtttgagaaaccacctagaaacattg

SEQ ID NO: 28461 - DNA, 122 bp, Homo sapiens
  misc_feature (61)..(62): /note="This region represents a CpG dinucleotide"
  misc_feature (61)..(61): /note="Nucleotide may be methylated to form 5-methylcytosine"
gtgcctgcctccctggggaggcccagccaccttgttcgctgagagtaatcatgagtcacacgtatatagctcttcgtatgtgctgggagcagctctaagcactgaatatgcattcactcatt

SEQ ID NO: 28462 - DNA, 122 bp, Homo sapiens
  misc_feature (61)..(62): /note="This region represents a CpG dinucleotide"
  misc_feature (61)..(61): /note="Nucleotide may be methylated to form 5-methylcytosine"
ttctagcaatgccctttttaagtaatacagcctcagggcaatcccttaattaatattttccgctgtttgaagtaggtatttttatctccatcttataaatgaatgaaatggacctgagcatg

SEQ ID NO: 28463 - DNA, 122 bp, Homo sapiens
  misc_feature (61)..(62): /note="This region represents a CpG dinucleotide"
  misc_feature (61)..(61): /note="Nucleotide may be methylated to form 5-methylcytosine"
cattcaagatgtggcccgactgcttcgaacagcctacactcaggtacaggagcaaagaagcgacttaaagttggaatatatatttaagcaggaagcagagcataaaagtttggaaaatttgc

SEQ ID NO: 28464 - DNA, 122 bp, Homo sapiens
  misc_feature (61)..(62): /note="This region represents a CpG dinucleotide"
  misc_feature (61)..(61): /note="Nucleotide may be methylated to form 5-methylcytosine"
gtgcactctgactacatcacagatgatagttcagtcctgcacctacaaactggcaggctccgtgctgggctctgggcatatgaaaataagcaccacaggcaaaatgcctgctcttgtgagat

SEQ ID NO: 28465 - DNA, 122 bp, Homo sapiens
  misc_feature (61)..(62): /note="This region represents a CpG dinucleotide"
  misc_feature (61)..(61): /note="Nucleotide may be methylated to form 5-methylcytosine"
ccgcaaatataaacaccgagagcactttccagggggatactgtagacctcaaaggttgagcggtagagaaatgaaggcttagggtggtgggctgcagggagcccgtttgaagggactctgcg

SEQ ID NO: 28466 - DNA, 122 bp, Homo sapiens
  misc_feature (61)..(62): /note="This region represents a CpG dinucleotide"
  misc_feature (61)..(61): /note="Nucleotide may be methylated to form 5-methylcytosine"
gatgacatattcacaaagtaaagcaaatttcatgacatgtagctggcagtccaggagctccgtgggacccagaagttgaaccagtcttgttctccagaaggctgccctcaagtggtggccaa

SEQ ID NO: 28467 - DNA, 122 bp, Homo sapiens
  misc_feature (61)..(62): /note="This region represents a CpG dinucleotide"
  misc_feature (61)..(61): /note="Nucleotide may be methylated to form 5-methylcytosine"
gcccagcgagcatacctctttgtacaacatgccctcttttaatttgttttgtttgcctggcgaacatgtgaggattttattgatttacaaaataaacaacagggagctgactgtacttgtac

SEQ ID NO: 28468 - DNA, 122 bp, Homo sapiens
  misc_feature (61)..(62): /note="This region represents a CpG dinucleotide"
  misc_feature (61)..(61): /note="Nucleotide may be methylated to form 5-methylcytosine"
cttctaaaagaaggaaaaccatagtgtatttgtgtatacaggcttgacagtttcaggacacggatccaactgctaacaccagttatctctgaggacctggaggagctggcacctggggaggg

SEQ ID NO: 28469 - DNA, 122 bp, Homo sapiens
  misc_feature (61)..(62): /note="This region represents a CpG dinucleotide"
  misc_feature (61)..(61): /note="Nucleotide may be methylated to form 5-methylcytosine"
acaaaccctcaaaagtaggaagagagagggacttaccgttcgccgcgacccccaggctggcggagccacttttaactaagaatgaattagggacaaactcttcctcagagtctgagtccggg

SEQ ID NO: 28470 - DNA, 122 bp, Homo sapiens
  misc_feature (61)..(62): /note="This region represents a CpG dinucleotide"
  misc_feature (61)..(61): /note="Nucleotide may be methylated to form 5-methylcytosine"
tggtattttggtcagtgcagacagctgctgggggtgacgtcagtgcagtgggcctctgcacgctcagccccggatgtcgggagggggaggagggaggggagagctactggatgcaaagctct

SEQ ID NO: 28471 - DNA, 122 bp, Homo sapiens
  misc_feature (61)..(62): /note="This region represents a CpG dinucleotide"
  misc_feature (61)..(61): /note="Nucleotide may be methylated to form 5-methylcytosine"
ttcacaactggcaaggttaggagatactggttcctggcacaggcatggtcctgacctggccggctggccacctcatggttccctgaggagaaccacttgcctataggccctgagggggaaca

SEQ ID NO: 28472 - DNA, 122 bp, Homo sapiens
  misc_feature (61)..(62): /note="This region represents a CpG dinucleotide"
  misc_feature (61)..(61): /note="Nucleotide may be methylated to form 5-methylcytosine"
tattaaaaaagaaactgcatgtgtaagattatcattatctgttgtgggtgggggtggatacgtagagtggatgatttgcaaaagacaggaagatcctcgttatatttagggtatcttttctt

SEQ ID NO: 28473 - DNA, 122 bp, Homo sapiens
  misc_feature (61)..(62): /note="This region represents a CpG dinucleotide"
  misc_feature (61)..(61): /note="Nucleotide may be methylated to form 5-methylcytosine"
tttcttcttttcctccctattggaaacacataacgtttcagaagaaagatcgcccaagagcgctggtttgggaagaggttctataaaagtgccatttggctggcccagtcttagaacccagg

SEQ ID NO: 28474 - DNA, 122 bp, Homo sapiens
  misc_feature (61)..(62): /note="This region represents a CpG dinucleotide"
  misc_feature (61)..(61): /note="Nucleotide may be methylated to form 5-methylcytosine"
ttgcatctctttatctgcacaatgcggataatatttaacacaggattatgataaagattacgtgaaaagtgacgtctgtaaaatgtccagctctaattgaccttcacaaatgatagcaaacc

SEQ ID NO: 28475 - DNA, 122 bp, Homo sapiens
  misc_feature (61)..(62): /note="This region represents a CpG dinucleotide"
  misc_feature (61)..(61): /note="Nucleotide may be methylated to form 5-methylcytosine"
acattgcacagtcatagtaatgaggtaagatcttccgtgtaaagtgactgtatggtccagcgtgtggcaagctctccatgagtaacagctgttgctatttcagctccaccagatgctgtgtc

SEQ ID NO: 28476 - DNA, 122 bp, Homo sapiens
  misc_feature (61)..(62): /note="This region represents a CpG dinucleotide"
  misc_feature (61)..(61): /note="Nucleotide may be methylated to form 5-methylcytosine"
agcagtcaaacgtgtttacaggtcagctctgctcctggccaagtggcgttggctggggcacgtggtgagtgggtggtggcggaccaggctcctgtgtcagctgcaggtgctgagctggatct

SEQ ID NO: 28477 - DNA, 122 bp, Homo sapiens
  misc_feature (61)..(62): /note="This region represents a CpG dinucleotide"
  misc_feature (61)..(61): /note="Nucleotide may be methylated to form 5-methylcytosine"
gcgtgctgtctacgagtgccagctcctgagggttggcagataaatgctctggatgcctcacgcctcagggggtgttcaaggattccatgctgtctttcagagatctccagaaagatccagct

SEQ ID NO: 28478 - DNA, 122 bp, Homo sapiens
  misc_feature (61)..(62): /note="This region represents a CpG dinucleotide"
  misc_feature (61)..(61): /note="Nucleotide may be methylated to form 5-methylcytosine"
tctcttcctatcaatttgtgtaccacttaaaaatgcttacagctggctttggaggaagagcggttaaaatcaaacgtactcactctgagacattcaaatatccaggatatagccactgagca

SEQ ID NO: 28479 - DNA, 122 bp, Homo sapiens
  misc_feature (61)..(62): /note="This region represents a CpG dinucleotide"
  misc_feature (61)..(61): /note="Nucleotide may be methylated to form 5-methylcytosine"
agttcacgtgccacctggaggcagtggtagtcatccatgccttctcggtgaggcactgtacgccagagtgactttaaagtatgaggaagccattagcactgctccagggaccacatattttt

SEQ ID NO: 28480 - DNA, 122 bp, Homo sapiens
  misc_feature (61)..(62): /note="This region represents a CpG dinucleotide"
  misc_feature (61)..(61): /note="Nucleotide may be methylated to form 5-methylcytosine"
tggagctagtactttgaaaggcgtttatctgtcaagagattaaactgctattttcatctacggaggaaactagaggaagtgtaaaccagtttaagaacagcagaaactagcctacttttttc

SEQ ID NO: 28481 - DNA, 122 bp, Homo sapiens
  misc_feature (61)..(62): /note="This region represents a CpG dinucleotide"
  misc_feature (61)..(61): /note="Nucleotide may be methylated to form 5-methylcytosine"
ctttggctgcgcggacttgttgcggtggctgggttgtgggtcctccggcgccgagggacccgagcttcctgggtacccggcaggctgcccgcccgctgggggctgggaaggggcgtgccaat

SEQ ID NO: 28482 - DNA, 122 bp, Homo sapiens
  misc_feature (61)..(62): /note="This region represents a CpG dinucleotide"
  misc_feature (61)..(61): /note="Nucleotide may be methylated to form 5-methylcytosine"
ctctagttctgtgctgcccctcacctccatgtttgatgaagatgaacatgccctcaagatcgcctcactcttcacaaagtgccctgatgagtcatgcagaaggagggtgttctagaggcctt

SEQ ID NO: 28483 - DNA, 122 bp, Homo sapiens
  misc_feature (61)..(62): /note="This region represents a CpG dinucleotide"
  misc_feature (61)..(61): /note="Nucleotide may be methylated to form 5-methylcytosine"
gactagccaggtcagtctctgaacctgtctccttatctctacctacttcataggatgaaacgagccagtgcatgcagagagatttaagcctcagcgtaaatgctctgtaactgtgagctgtt

SEQ ID NO: 28484 - DNA, 122 bp, Homo sapiens
  misc_feature (61)..(62): /note="This region represents a CpG dinucleotide"
  misc_feature (61)..(61): /note="Nucleotide may be methylated to form 5-methylcytosine"
gccagctgaagataggccctgatagctccccaggttaggtcactgatgtaaaatgctcctcgccttggccctacctccctccctgtccccacccctgcagaaggcaactgttggttttcttc

SEQ ID NO: 28485 - DNA, 122 bp, Homo sapiens
  misc_feature (61)..(62): /note="This region represents a CpG dinucleotide"
  misc_feature (61)..(61): /note="Nucleotide may be methylated to form 5-methylcytosine"
gcttttgactggctgcaggctctgcagacccatgcttgttggtgtgagtgctgctgagtccggcccagatcctacagaaatgactgtgagaatgatgaataacgtggcatgttcagacagaa

SEQ ID NO: 28486 - DNA, 122 bp, Homo sapiens
  misc_feature (61)..(62): /note="This region represents a CpG dinucleotide"
  misc_feature (61)..(61): /note="Nucleotide may be methylated to form 5-methylcytosine"
atcagaagctctcagaagctggtgagccactccacttaccactggaacagtaactggggacggtccccagaaagccacaggaagacttctgccaatcttgtgggcagcctggggaagcctca

SEQ ID NO: 28487 - DNA, 122 bp, Homo sapiens
  misc_feature (61)..(62): /note="This region represents a CpG dinucleotide"
  misc_feature (61)..(61): /note="Nucleotide may be methylated to form 5-methylcytosine"
tggaagccttttgagtctagagaagtctttgatgatgttctccttggctgctgcccataacgttttagtccaaatcagtagctgtgactgaacttggcctaactagaagtacctgttgtaaa

SEQ ID NO: 28488 - DNA, 122 bp, Homo sapiens
  misc_feature (61)..(62): /note="This region represents a CpG dinucleotide"
  misc_feature (61)..(61): /note="Nucleotide may be methylated to form 5-methylcytosine"
ccgaggaaggccgggcactggcagcctttaagtgccttgcaaggacatgtgccgggagtgcgtgtatgcctctaagtctcctgagcatgcccccgggcacttcagcctggccttggcctcat

SEQ ID NO: 28489 - DNA, 122 bp, Homo sapiens
  misc_feature (61)..(62): /note="This region represents a CpG dinucleotide"
  misc_feature (61)..(61): /note="Nucleotide may be methylated to form 5-methylcytosine"
gtttgccgaatcgcccttccatggtaagccattaggcatgaggccaatgatggttgtacacgcatgcactcacacgtgcactctcacatgcctcctgaccaaaactggataaacagaggaaa

SEQ ID NO: 28490 - DNA, 122 bp, Homo sapiens
  misc_feature (61)..(62): /note="This region represents a CpG dinucleotide"
  misc_feature (61)..(61): /note="Nucleotide may be methylated to form 5-methylcytosine"
tttgtgtatgctgtattgcagcacacgtcacatggagatgggcgtcaagaagttacctctcgtaccagccgctcaggagctcggtgtagaaactctatagcctcctgtgcagatgaacaacc

SEQ ID NO: 28491 - DNA, 122 bp, Homo sapiens
  misc_feature (61)..(62): /note="This region represents a CpG dinucleotide"
  misc_feature (61)..(61): /note="Nucleotide may be methylated to form 5-methylcytosine"
gacttctaaaacttaaatatgcccatatgcaaagctatgactggtcagaatttttatctccgtatcatggacactaagattttttttaatcttgttcatggcatttcatattagtcacctac

SEQ ID NO: 28492 - DNA, 122 bp, Homo sapiens
  misc_feature (61)..(62): /note="This region represents a CpG dinucleotide"
  misc_feature (61)..(61): /note="Nucleotide may be methylated to form 5-methylcytosine"
ctttaaacttagattctgtagccagtgctttaggcctggcattcctgtggctttggtaaccgtccccacattgtctaaaatccttcaaaagaatctctcattgttgcagagcttgagtagtg

SEQ ID NO: 28493 - DNA, 122 bp, Homo sapiens
  misc_feature (61)..(62): /note="This region represents a CpG dinucleotide"
  misc_feature (61)..(61): /note="Nucleotide may be methylated to form 5-methylcytosine"
atgacaaaggcattgatactggagttactcatgacaaaggcagagtgtgaactctgatcccggaggaagaagggttattttcaacaatctcttcagcttgaatagattgttgctgtgtgtga

SEQ ID NO: 28494 - DNA, 122 bp, Homo sapiens
  misc_feature (61)..(62): /note="This region represents a CpG dinucleotide"
  misc_feature (61)..(61): /note="Nucleotide may be methylated to form 5-methylcytosine"
catgaccattcagacttaatatttaccctaaaactggcattacccttgatttagtcatgacgtgattattaaatttgttaaaaaaattgggtcctgtataagaactgcccatgatttggatt

SEQ ID NO: 28495 - DNA, 122 bp, Homo sapiens
  misc_feature (61)..(62): /note="This region represents a CpG dinucleotide"
  misc_feature (61)..(61): /note="Nucleotide may be methylated to form 5-methylcytosine"
caaggctctaactgtagtaagaaaagctgaactgaaaccatcaaccaggctccctctttacggtctgatcaatcctgacagtaccatgtgagcagaagggcacagaattgacaaacaacatt

SEQ ID NO: 28496 - DNA, 122 bp, Homo sapiens
  misc_feature (61)..(62): /note="This region represents a CpG dinucleotide"
  misc_feature (61)..(61): /note="Nucleotide may be methylated to form 5-methylcytosine"
actgtggtgatggttgcacaaccctgtgaatatacaaaaaaccactgaagggtactgaagcgtggtggcaggtgcctgtagccccagctactcgggagactgaggcaggacaatcccttgaa

SEQ ID NO: 28497 - DNA, 122 bp, Homo sapiens
  misc_feature (61)..(62): /note="This region represents a CpG dinucleotide"
  misc_feature (61)..(61): /note="Nucleotide may be methylated to form 5-methylcytosine"
tggagtagtcagtcatggattagctgcaggggcattacatttactagaatgccttactctcgttgtgcttaggagggaaccaaatagaaaaaaattacaaagcccagaactgcagaatgatt

SEQ ID NO: 28498 - DNA, 122 bp, Homo sapiens
  misc_feature (61)..(62): /note="This region represents a CpG dinucleotide"
  misc_feature (61)..(61): /note="Nucleotide may be methylated to form 5-methylcytosine"
aatctagttacctatgtatctaaggtgccaagtcaacaaccttcctctttctgcacaattcgtaatgtgaccattataattagctttcagttaaaacttggcacatatggggctcctcgtcc

SEQ ID NO: 28499 - DNA, 122 bp, Homo sapiens
  misc_feature (61)..(62): /note="This region represents a CpG dinucleotide"
  misc_feature (61)..(61): /note="Nucleotide may be methylated to form 5-methylcytosine"
cctttaaagatgcaaatagattgaaactgacatgatacaaaaaaaaaaattccctgcaaacggaaatcgaaataaagtggaggtagctttacttacatcagatagaatagacattatatcaa

SEQ ID NO: 28500 - DNA, 122 bp, Homo sapiens
  misc_feature (61)..(62): /note="This region represents a CpG dinucleotide"
  misc_feature (61)..(61): /note="Nucleotide may be methylated to form 5-methylcytosine"
tttcatgtaaacttgagaagaatgtgtattctgtagttgttgtcttaggtagtctatagacgtgcattatatatccagttgattgatgatgctgttaagttcatctgtgtccttactcattt

SEQ ID NO: 28501 - DNA, 122 bp, Homo sapiens
  misc_feature (61)..(62): /note="This region represents a CpG dinucleotide"
  misc_feature (61)..(61): /note="Nucleotide may be methylated to form 5-methylcytosine"
tgagctggtttcagcacaccagtgtagtcttggtctcctttgtcatttttttctgaatgccgtctttccagtatgcaggctttgactaagcatttaggcagaactgaaacattcaaattaat

SEQ ID NO: 28502 - DNA, 122 bp, Homo sapiens
  misc_feature (61)..(62): /note="This region represents a CpG dinucleotide"
  misc_feature (61)..(61): /note="Nucleotide may be methylated to form 5-methylcytosine"
tcagctcctcccatgggcagtggggagctgctgggccctgtggaactggttctgctccgccgcccagtctcacccctggccgttccctgccctggctccacatcatcatgggcgtccctgcc

SEQ ID NO: 28503 - DNA, 122 bp, Homo sapiens
  misc_feature (61)..(62): /note="This region represents a CpG dinucleotide"
  misc_feature (61)..(61): /note="Nucleotide may be methylated to form 5-methylcytosine"
cgagagggggaagctgaatattgcgacatgaaagtctccggacaagatagggttccattccgcggaaagggtcttcctcttcattactggaatgtagtgtttcctcagaggcctgaggtaat

SEQ ID NO: 28504 - DNA, 122 bp, Homo sapiens
  misc_feature (61)..(62): /note="This region represents a CpG dinucleotide"
  misc_feature (61)..(61): /note="Nucleotide may be methylated to form 5-methylcytosine"
tgtaccttacaggaggacagggttcctccgtgtgtgggagtcatcgttcattcattcattcgctttcactgaacatttgttaaacatatatttttgaaccagagtactaggatttttaggta

SEQ ID NO: 28505 - DNA, 122 bp, Homo sapiens
  misc_feature (61)..(62): /note="This region represents a CpG dinucleotide"
  misc_feature (61)..(61): /note="Nucleotide may be methylated to form 5-methylcytosine"
aggatcttagaaaataaatcttcaacagaagtcaattttcaaatgacaaaaactacattccgagagttgaagagacttactcagtcttaggtctccttggcaaagcacagacttcatgcttt

SEQ ID NO: 28506 - DNA, 122 bp, Homo sapiens
  misc_feature (61)..(62): /note="This region represents a CpG dinucleotide"
  misc_feature (61)..(61): /note="Nucleotide may be methylated to form 5-methylcytosine"
cctggcccctgcctcaggccagggaaggtgtggctggctgggcaggagccatagtgccagcgtctactttggtcttagttgggttgtttggattttggtcctgacctcgtttctgaatgctg

SEQ ID NO: 28507 - DNA, 122 bp, Homo sapiens
  misc_feature (61)..(62): /note="This region represents a CpG dinucleotide"
  misc_feature (61)..(61): /note="Nucleotide may be methylated to form 5-methylcytosine"
ggtttttctatttttttcttttctttttatgtcattttcagggtaagtggttgactaatacggaagtaatacaagtgaggaaatatatgataagtttccttagtcatttgtcttacttagaa

SEQ ID NO: 28508 - DNA, 122 bp, Homo sapiens
  misc_feature (61)..(62): /note="This region represents a CpG dinucleotide"
  misc_feature (61)..(61): /note="Nucleotide may be methylated to form 5-methylcytosine"
ggggctcactgcctgttcctttgtttgtgggacctacccctgggaacactccatgccttgcgtgcttaggggaccagcctttccagcacgacctgtcagttggaatgttgatctgcttctct

SEQ ID NO: 28509 - DNA, 122 bp, Homo sapiens
  misc_feature (61)..(62): /note="This region represents a CpG dinucleotide"
  misc_feature (61)..(61): /note="Nucleotide may be methylated to form 5-methylcytosine"
tttgtaaaaggtccatccctctgggctcgtgtgagtttcctcattccacagaggtgatgtcgtgttctcagctcacacatcaggggatgcgtcatctcagtgtgtcccttcactggtgacaa

SEQ ID NO: 28510 - DNA, 122 bp, Homo sapiens
  misc_feature (61)..(62): /note="This region represents a CpG dinucleotide"
  misc_feature (61)..(61): /note="Nucleotide may be methylated to form 5-methylcytosine"
gttctctgcttccagctgccctggagctgcggggagtgagccagggtcgcatcttcacagcgtgaatggcaaggacagcctcggtttcccctcttctgcgctatcaccaactaaatatttga

SEQ ID NO: 28511 - DNA, 122 bp, Homo sapiens
  misc_feature (61)..(62): /note="This region represents a CpG dinucleotide"
  misc_feature (61)..(61): /note="Nucleotide may be methylated to form 5-methylcytosine"
ctttatgttttggagaatgacaagtaaattgaacgaagcagtgtgtaacatctttaagaccggcttcactcagcacagtgtctctgagattcatcttagatgctgcgtacgtacaccagtca

SEQ ID NO: 28512 - DNA, 122 bp, Homo sapiens
  misc_feature (61)..(62): /note="This region represents a CpG dinucleotide"
  misc_feature (61)..(61): /note="Nucleotide may be methylated to form 5-methylcytosine"
tagttgagacgcacagagttctgggccatctcggcctcagggtggcggctagtgaggtggcgcagagcgcagacggcaggctccgtgatgtcgtccttgtcaccagcacgcaggatggcatg

SEQ ID NO: 28513 - DNA, 122 bp, Homo sapiens
  misc_feature (61)..(62): /note="This region represents a CpG dinucleotide"
  misc_feature (61)..(61): /note="Nucleotide may be methylated to form 5-methylcytosine"
caagtcattaatggttgccactacttaaatgaggctgcacaaatacgccagtttatccaacgtccctaaagtgagataatggcaacacatacaacacaggtgcacaaaaatcacaagttgtt

SEQ ID NO: 28514 - DNA, 122 bp, Homo sapiens
  misc_feature (61)..(62): /note="This region represents a CpG dinucleotide"
  misc_feature (61)..(61): /note="Nucleotide may be methylated to form 5-methylcytosine"
gccaaaggaaaatagatcaagggatttgtgattcattccctacttcagcatttctcaaagcgtgggctgtggattggctggaacagaataacatgagtcactggatttaaatcagattctga

SEQ ID NO: 28515 - DNA, 122 bp, Homo sapiens
  misc_feature (61)..(62): /note="This region represents a CpG dinucleotide"
  misc_feature (61)..(61): /note="Nucleotide may be methylated to form 5-methylcytosine"
ccggctgcgctggaagcccggccaccttttactgctcagctcgattacacaccataaacccgacctcacaatggaattgccccggaaattctcctgtaaattgtagagtttagttccttgtg

SEQ ID NO: 28516 - DNA, 122 bp, Homo sapiens
  misc_feature (61)..(62): /note="This region represents a CpG dinucleotide"
  misc_feature (61)..(61): /note="Nucleotide may be methylated to form 5-methylcytosine"
gcagatgatgacgcctgcatcacggactgcatggtcgggatggcggagtgaccacaggctcgggaagtgacttgggacggtcactgtggctgagttagcagttggctgcttgttgttttctt

SEQ ID NO: 28517 - DNA, 122 bp, Homo sapiens
  misc_feature (61)..(62): /note="This region represents a CpG dinucleotide"
  misc_feature (61)..(61): /note="Nucleotide may be methylated to form 5-methylcytosine"
ctcttaatccacacattttcaggctggtaacaacacatactggcatctaacttgcagagacgggtgtccttctaacatcaaaatgtcataaaatagaaagtgcctgtagtgaaaactccctg

SEQ ID NO: 28518 - DNA, 122 bp, Homo sapiens
  misc_feature (61)..(62): /note="This region represents a CpG dinucleotide"
  misc_feature (61)..(61): /note="Nucleotide may be methylated to form 5-methylcytosine"
tagtcctcaataattttttaagcatataaagagttcttgagaccaaaggtgagaaaaccacggtagcagacaaaacatggggcccttgtcttgatcggttggttggttacttgctttgactt

SEQ ID NO: 28519 - DNA, 122 bp, Homo sapiens
  misc_feature (61)..(62): /note="This region represents a CpG dinucleotide"
  misc_feature (61)..(61): /note="Nucleotide may be methylated to form 5-methylcytosine"
agccctcaggagcgagggagtcacctgcctgtggtactattaagaactccaggcaggctgcgtgagaagattaaaataagccctgggcctgtggttgagccaaaagacttgtacccctcccc

SEQ ID NO: 28520 - DNA, 122 bp, Homo sapiens
  misc_feature (61)..(62): /note="This region represents a CpG dinucleotide"
  misc_feature (61)..(61): /note="Nucleotide may be methylated to form 5-methylcytosine"
cccagcatcctcttggttaaatagataaaagaatggctgccataccatgtctgtgaaagccggggagcagcaaccacagagcagaagtcacttctgctgagcttccaaatcccatatgcctg

SEQ ID NO: 28521 - DNA, 122 bp, Homo sapiens
  misc_feature (61)..(62): /note="This region represents a CpG dinucleotide"
  misc_feature (61)..(61): /note="Nucleotide may be methylated to form 5-methylcytosine"
atacttgtatttataacattttccctaaaaaatatttcaaataactcttcagatcattcacgtcccaaggattgtcagataggttccttttatgacttcttacacactcctatgtttgacag

SEQ ID NO: 28522 - DNA, 122 bp, Homo sapiens
  misc_feature (61)..(62): /note="This region represents a CpG dinucleotide"
  misc_feature (61)..(61): /note="Nucleotide may be methylated to form 5-methylcytosine"
gaccatcttctggttcattgtgagggtctcattaattcccatgaactcattcaaccaacacgtgcttgttgggctggtacagaagatgaacaaaggcagaggacacagattcaccatgattt

SEQ ID NO: 28523 - DNA, 122 bp, Homo sapiens
  misc_feature (61)..(62): /note="This region represents a CpG dinucleotide"
  misc_feature (61)..(61): /note="Nucleotide may be methylated to form 5-methylcytosine"
cggaagactgctttcagaaaacaggccactctcagttgaaacactatgcctgaaggattgcgcaattttaaacttccgagatataaaaaacatccttcacccaagtctcttgtagaatgttg

SEQ ID NO: 28524 - DNA, 122 bp, Homo sapiens
  misc_feature (61)..(62): /note="This region represents a CpG dinucleotide"
  misc_feature (61)..(61): /note="Nucleotide may be methylated to form 5-methylcytosine"
attcctatgacgcattactgcagtcacgctgggatctcgaatagtttcccattaggtgaacgcactctaaaacgtcgcccgaagtttggtgtcatactgaagctctcgggagctacctggaa

SEQ ID NO: 28525 - DNA, 122 bp, Homo sapiens
  misc_feature (61)..(62): /note="This region represents a CpG dinucleotide"
  misc_feature (61)..(61): /note="Nucleotide may be methylated to form 5-methylcytosine"
gctaggattcattcacttagtagcattccctgcaagggcgttctgtatgcatcacacacacggcactgctgtcccacaatagtctgcactaaccacatggcagggcacatggctgtgaccag

SEQ ID NO: 28526 - DNA, 122 bp, Homo sapiens
  misc_feature (61)..(62): /note="This region represents a CpG dinucleotide"
  misc_feature (61)..(61): /note="Nucleotide may be methylated to form 5-methylcytosine"
ttgtgggaatggtgtgattaatcaggactaggaaaaccaaggcagttgctggagtagggacgcagaacttgttgactccggaagtacacagaagctagaaatcaggaaggaacagtagttca

SEQ ID NO: 28527 - DNA, 122 bp, Homo sapiens
  misc_feature (61)..(62): /note="This region represents a CpG dinucleotide"
  misc_feature (61)..(61): /note="Nucleotide may be methylated to form 5-methylcytosine"
acagcaaacacgctgctccccagcacctcctgcagtccagccccaccctccttgctgctgcgcttagaggagcagcctgagaccagacctccaggtctctttcatccaacccacctgcctgg

SEQ ID NO: 28528 - DNA, 122 bp, Homo sapiens
  misc_feature (61)..(62): /note="This region represents a CpG dinucleotide"
  misc_feature (61)..(61): /note="Nucleotide may be methylated to form 5-methylcytosine"
tgaggctgaccctgggagtgagttaatgagagtgtatctggagttgagcatttggtgctgcgagagaagattcaagctgaagattatttttgtagagcttcatgacccgaattatttataga

SEQ ID NO: 28529 - DNA, 122 bp, Homo sapiens
  misc_feature (61)..(62): /note="This region represents a CpG dinucleotide"
  misc_feature (61)..(61): /note="Nucleotide may be methylated to form 5-methylcytosine"
tcttcaccctcctcccctggtgcttgcctgtgccccagcagggtgacagtgatgtagtagcgggtcctcctggaagagggacgcgtgtgtagggtctgggcaggctctggcaaggcagtccc

SEQ ID NO: 28530 - DNA, 122 bp, Homo sapiens
  misc_feature (61)..(62): /note="This region represents a CpG dinucleotide"
  misc_feature (61)..(61): /note="Nucleotide may be methylated to form 5-methylcytosine"
tgaggtttatttaactggcttaggccaaatgtattcactcaatgcttgtttattgagcaccgactatgtgccagacactgttataggggctgggctcccaacagtgaaaagggcaggcaaga

SEQ ID NO: 28531 - DNA, 122 bp, Homo sapiens
  misc_feature (61)..(62): /note="This region represents a CpG dinucleotide"
  misc_feature (61)..(61): /note="Nucleotide may be methylated to form 5-methylcytosine"
ccattatctcttttctccataccaatattacaagtacagcctagagtggtcacactgtcacggcaatttgctatagtccatatgtgtgctctccaacttcagctgaaccctcagtcctacat

SEQ ID NO: 28532 - DNA, 122 bp, Homo sapiens
  misc_feature (61)..(62): /note="This region represents a CpG dinucleotide"
  misc_feature (61)..(61): /note="Nucleotide may be methylated to form 5-methylcytosine"
agcctcacaaattctgagacaaggactttatgctctctactctaagagatgggacattcacgatttacaacctgaaacacctctgacagaatagcaggcatcttgacgtaaggtcaaataga

SEQ ID NO: 28533 - DNA, 122 bp, Homo sapiens
  misc_feature (61)..(62): /note="This region represents a CpG dinucleotide"
  misc_feature (61)..(61): /note="Nucleotide may be methylated to form 5-methylcytosine"
ccagttccttgtcctacatttcactgatcacatgaccttgtagaagttgctcaaattctgcgtgctgcctttgaagtaaacagaggagccaaacaagttgaacatacagttgtttgagggaa

SEQ ID NO: 28534 - DNA, 122 bp, Homo sapiens
  misc_feature (61)..(62): /note="This region represents a CpG dinucleotide"
  misc_feature (61)..(61): /note="Nucleotide may be methylated to form 5-methylcytosine"
ttgggggataggcacctcttctgaaaaagaatgggctaagagatccaggagagagcttttcgccccatatacccacccccttgggctccaggaaccaggaaggagggagaggacagaaagga

SEQ ID NO: 28535 - DNA, 122 bp, Homo sapiens
  misc_feature (61)..(62): /note="This region represents a CpG dinucleotide"
  misc_feature (61)..(61): /note="Nucleotide may be methylated to form 5-methylcytosine"
gtacaaggacctgaagtgagaaacagtttggcttgttcacagaacaaaaagggcagtcagcgtgactagagcatactgaacaagaggaagaatgcacaggaaattacataggaaaggcagtc

SEQ ID NO: 28536 - DNA, 122 bp, Homo sapiens
  misc_feature (61)..(62): /note="This region represents a CpG dinucleotide"
  misc_feature (61)..(61): /note="Nucleotide may be methylated to form 5-methylcytosine"
tttgcatggttgcaataaatactgaatatattcacatacagcactgagcacagtccctggcgcctgagcctttccatgtgccaagtgcttggcatcatactggaaacacagagatcaacaag

SEQ ID NO: 28537 - DNA, 122 bp, Homo sapiens
  misc_feature (61)..(62): /note="This region represents a CpG dinucleotide"
  misc_feature (61)..(61): /note="Nucleotide may be methylated to form 5-methylcytosine"
tatatgttacaggtgaaaagcaagaattaaaactagttatctgaatgtaaaaggaatcaacggctaaatcaagcttaaagtcttcctgtccaagggatatgaaaggtacctcaacctttggt

SEQ ID NO: 28538 - DNA, 122 bp, Homo sapiens
  misc_feature (61)..(62): /note="This region represents a CpG dinucleotide"
  misc_feature (61)..(61): /note="Nucleotide may be methylated to form 5-methylcytosine"
gaggtgcttggtaaggagctctgaatcatatacatggggaataaaccacagcagagcctacgacaagaaggtgaggaacacagcagccgtctgttgtcatacagcagctcccttggagaaga

SEQ ID NO: 28539 - DNA, 122 bp, Homo sapiens
  misc_feature (61)..(62): /note="This region represents a CpG dinucleotide"
  misc_feature (61)..(61): /note="Nucleotide may be methylated to form 5-methylcytosine"
ttcaaaaaatactgccacttaccagagattctgacgagtgaggagtggccagggcattcacggtttaaaagtcctccggatgattttaatggacacctggttcattgtgtgaaaaccacttt

SEQ ID NO: 28540 - DNA, 122 bp, Homo sapiens
  misc_feature (61)..(62): /note="This region represents a CpG dinucleotide"
  misc_feature (61)..(61): /note="Nucleotide may be methylated to form 5-methylcytosine"
gggtagaagaatctccagaaaagccagccagaacataaacacccaagtcctttctgccctcgcttcattccacaggctcctcattccttctgctccaatcctactggtcactcgagactggg

SEQ ID NO: 28541 - DNA, 122 bp, Homo sapiens
  misc_feature (61)..(62): /note="This region represents a CpG dinucleotide"
  misc_feature (61)..(61): /note="Nucleotide may be methylated to form 5-methylcytosine"
cagtgaaatcattctgaagccaaaacatgcctaactacgtgaaacagcattctcaccttacgggcaaaagttgtgtaataatatacatagtgtaagcttttgcttgaatcatctgaattgga

SEQ ID NO: 28542 - DNA, 122 bp, Homo sapiens
  misc_feature (61)..(62): /note="This region represents a CpG dinucleotide"
  misc_feature (61)..(61): /note="Nucleotide may be methylated to form 5-methylcytosine"
gctcgccttgttttatataggaagaaactaagactcagacatgttgggtaacattctaaacgtcacacagctagcaaatggcagtgccaggagtcaaggccaggtccatggatgttacaata

SEQ ID NO: 28543 - DNA, 122 bp, Homo sapiens
  misc_feature (61)..(62): /note="This region represents a CpG dinucleotide"
  misc_feature (61)..(61): /note="Nucleotide may be methylated to form 5-methylcytosine"
cattccccagcaagggagaaataattcagattacatcctcctgctgttggatcagggcagcgcatttcaatttaagcccatacagccagagacaggttcatgtagaatggaataaattaata

SEQ ID NO: 28544 - DNA, 122 bp, Homo sapiens
  misc_feature (61)..(62): /note="This region represents a CpG dinucleotide"
  misc_feature (61)..(61): /note="Nucleotide may be methylated to form 5-methylcytosine"
ggcaggaatcagctctcagaattccacaccaaggccttctgggctcccccggtcttcccacggacgagacacaagtgacccttggaaacttctagagaaatgaaaggtgaaatgacaaattc

SEQ ID NO: 28545 - DNA, 122 bp, Homo sapiens
  misc_feature (61)..(62): /note="This region represents a CpG dinucleotide"
  misc_feature (61)..(61): /note="Nucleotide may be methylated to form 5-methylcytosine"
aggttgccacatgacattttaatatcacctgcaaacctaaatccagtgagtgcctacagacgacacacttaacagctcagggcatgattcagaggaagcaattttccaaagtgaagataatt

SEQ ID NO: 28546 - DNA, 122 bp, Homo sapiens
  misc_feature (61)..(62): /note="This region represents a CpG dinucleotide"
  misc_feature (61)..(61): /note="Nucleotide may be methylated to form 5-methylcytosine"
tccccgtgcatcgccacggtggcagggaaggcctccgagtgtgcgaacaagcacaccctgcgccatcgaaagacaattacgtattcaaatgaaggatgtacgcggggccttatcacagatgt

SEQ ID NO: 28547 - DNA, 122 bp, Homo sapiens
  misc_feature (61)..(62): /note="This region represents a CpG dinucleotide"
  misc_feature (61)..(61): /note="Nucleotide may be methylated to form 5-methylcytosine"
aaaaggaaaaacaaaacaaagggaacaggaggaaatttttagagatgatggataagtttacggcactgatagtgataatggtttcacaagtgtatacttatggcaaagtacatcaaattata

SEQ ID NO: 28548 - DNA, 122 bp, Homo sapiens
  misc_feature (61)..(62): /note="This region represents a CpG dinucleotide"
  misc_feature (61)..(61): /note="Nucleotide may be methylated to form 5-methylcytosine"
agccccaagagtgttgctggtgtgaggttgactggaggactttcccacaggctgggtttgcggtttaatgtgaaagctgaaactagaggaggagatgctaaccaaagtggccagaaggtgaa

SEQ ID NO: 28549 - DNA, 122 bp, Homo sapiens
  misc_feature (61)..(62): /note="This region represents a CpG dinucleotide"
  misc_feature (61)..(61): /note="Nucleotide may be methylated to form 5-methylcytosine"
atgcattgggctctttaatgcatattatctcatctattgctcacaatagccctttaaggtcggtattatttccagttttacagaagagtaaatgcccagatgattgctcaatattacacagg

SEQ ID NO: 28550 - DNA, 122 bp, Homo sapiens
  misc_feature (61)..(62): /note="This region represents a CpG dinucleotide"
  misc_feature (61)..(61): /note="Nucleotide may be methylated to form 5-methylcytosine"
aggatttgacatctgagtcaagagctcaaaagtcaataatgtgacctgaacctgaaccttcgcgaacagcttccaacgcctggctgagaagaaagggctcgtggggtatttggttgcatttc

SEQ ID NO: 28551 - DNA, 122 bp, Homo sapiens
  misc_feature (61)..(62): /note="This region represents a CpG dinucleotide"
  misc_feature (61)..(61): /note="Nucleotide may be methylated to form 5-methylcytosine"
cttctctcccttcccttctctcttcttccctgaggtcagcctcacattctgcaggtctagcgaaagggtgtctcacctcaatcatgagaaagaggagtcccagctccaggagaagcaggagc

SEQ ID NO: 28552 - DNA, 122 bp, Homo sapiens
  misc_feature (61)..(62): /note="This region represents a CpG dinucleotide"
  misc_feature (61)..(61): /note="Nucleotide may be methylated to form 5-methylcytosine"
ttgagaacaggcgatttaacaaatagtgccagcccgagccagagaaggccaagtgccaggcgcccgcactccctgacagatgttccaagaggcctgtgggctcctgttctggctgaacaacg

SEQ ID NO: 28553 - DNA, 122 bp, Homo sapiens
  misc_feature (61)..(62): /note="This region represents a CpG dinucleotide"
  misc_feature (61)..(61): /note="Nucleotide may be methylated to form 5-methylcytosine"
cgcccgcctcagactcccgaagtgctagggttacaggtgtgaaccaccatgcctaactatcgttgctactttctattggaagagaaggcagccctgatttagtctgtttacagtctgcatta

SEQ ID NO: 28554 - DNA, 122 bp, Homo sapiens
  misc_feature (61)..(62): /note="This region represents a CpG dinucleotide"
  misc_feature (61)..(61): /note="Nucleotide may be methylated to form 5-methylcytosine"
cccatgttctttctccaacctcatgggaacaggcagtgggagcctaaggccaatgagtcacggttagcctagaggatcctttgcagcaagctgtatcacaccccagagtgcctgctgattgg

SEQ ID NO: 28555 - DNA, 122 bp, Homo sapiens
  misc_feature (61)..(62): /note="This region represents a CpG dinucleotide"
  misc_feature (61)..(61): /note="Nucleotide may be methylated to form 5-methylcytosine"
actatgattatcttccttctgcatattaggaaactgagagaggatacgtgacttacccaacgtcacaaggctaacaagtgttggtacaggaatttggacccaggtccatgtgactccagacc

SEQ ID NO: 28556 - DNA, 122 bp, Homo sapiens
  misc_feature (61)..(62): /note="This region represents a CpG dinucleotide"
  misc_feature (61)..(61): /note="Nucleotide may be methylated to form 5-methylcytosine"
ggttatgaaaaagtttactactcacatgaggccttctagggaaagcaaagcgggcacccacgccagtctgttgggcttcagtgaaaggacgaacaagtggctctggtttttgttgtggttat

SEQ ID NO: 28557 - DNA, 122 bp, Homo sapiens
  misc_feature (61)..(62): /note="This region represents a CpG dinucleotide"
  misc_feature (61)..(61): /note="Nucleotide may be methylated to form 5-methylcytosine"
cataatacaaaacatgctgttaggagcctaattcaaagatttcctgtcaccaataaagagcgtacagaacttctgcctaaaacagaaagaggaaatgtgtttgcagttgaagctggtatgta

SEQ ID NO: 28558 - DNA, 122 bp, Homo sapiens
  misc_feature (61)..(62): /note="This region represents a CpG dinucleotide"
  misc_feature (61)..(61): /note="Nucleotide may be methylated to form 5-methylcytosine"
gccctcccagagtgagcccactgagtctccatggtgggagggttctggaatcatcagccccgttacctgcagagggagtgggcagggaagggggctgggggcagccgcagcctcccctccgt

SEQ ID NO: 28559 - DNA, 122 bp, Homo sapiens
  misc_feature (61)..(62): /note="This region represents a CpG dinucleotide"
  misc_feature (61)..(61): /note="Nucleotide may be methylated to form 5-methylcytosine"
gcccattattctaggtcctaatctgtttggtggagttgttactccacttctctgaccttgcgcgtagggcctgggcactcctaggaattaggggcagggtggggttagggctgaaacccatt

SEQ ID NO: 28560 - DNA, 122 bp, Homo sapiens
  misc_feature (61)..(62): /note="This region represents a CpG dinucleotide"
  misc_feature (61)..(61): /note="Nucleotide may be methylated to form 5-methylcytosine"
aggtcgaccttgtttgcctaccccaaatcagtgacatctcttcccatcatcctcccccatcgacctgagaaactaaaagtcattctggtggcaatgagttgtaagaaattcattttttcatc

SEQ ID NO: 28561 - DNA, 122 bp, Homo sapiens
  misc_feature (61)..(62): /note="This region represents a CpG dinucleotide"
  misc_feature (61)..(61): /note="Nucleotide may be methylated to form 5-methylcytosine"
cactctctggtgccaaactagcacttgcattttctgagggtaagtggtttcttacacttacgtcctggatgactcctttgctcaatctagtcctggcttcacacttcatccttatttctcct

SEQ ID NO: 28562 - DNA, 122 bp, Homo sapiens
  misc_feature (61)..(62): /note="This region represents a CpG dinucleotide"
  misc_feature (61)..(61): /note="Nucleotide may be methylated to form 5-methylcytosine"
ggctgctggctgaggttaaatgagagcatgtgggtgagccacagttcagtgcatggcatgcgggaggccttcagtaagtggtagctaccccgtcatcatcactgtcacctgggatgtctcca

SEQ ID NO: 28563 - DNA, 122 bp, Homo sapiens
  misc_feature (61)..(62): /note="This region represents a CpG dinucleotide"
  misc_feature (61)..(61): /note="Nucleotide may be methylated to form 5-methylcytosine"
tcctctgttgaattatgtcatatttctttctttcaatactatatttcaggctcattcctccgtaaggaattcccatagtaatagcacctggtatgtccctttagtcatccaaagaataccac

SEQ ID NO: 28564 - DNA, 122 bp, Homo sapiens
  misc_feature (61)..(62): /note="This region represents a CpG dinucleotide"
  misc_feature (61)..(61): /note="Nucleotide may be methylated to form 5-methylcytosine"
tctcattagcagatgctctagctggtttccatgaaggctttccacagtgacttccatagtcgtcataggcgactactatcagattccatctcaacgtttcacattcacaggcagaggctcca

SEQ ID NO: 28565 - DNA, 122 bp, Homo sapiens
  misc_feature (61)..(62): /note="This region represents a CpG dinucleotide"
  misc_feature (61)..(61): /note="Nucleotide may be methylated to form 5-methylcytosine"
gaagtgctattcattcttaaagcagaagcagcagaggagaaatcagagacaccaactctgcggacctgctgaaggaagtgaactacagggcattgttccattccctgagaacagcaaacacc

SEQ ID NO: 28566 - DNA, 122 bp, Homo sapiens
  misc_feature (61)..(62): /note="This region represents a CpG dinucleotide"
  misc_feature (61)..(61): /note="Nucleotide may be methylated to form 5-methylcytosine"
cagcagcttgcaagccaggttcaacttgggttggactcactgacagcgaggccaggcaggcgtggtacaggccgggtggtatgctggtgtggcaggagggcacttccctgcagagcaaatga

SEQ ID NO: 28567 - DNA, 122 bp, Homo sapiens
  misc_feature (61)..(62): /note="This region represents a CpG dinucleotide"
  misc_feature (61)..(61): /note="Nucleotide may be methylated to form 5-methylcytosine"
gctccaccctctccctattagctgtgtttccttgggcatgtcactgtacctctttgaacccgattcctatctgtgaaataaggataatatgagcccctgcttcatgagcaaatgtgcctggc

SEQ ID NO: 28568 - DNA, 122 bp, Homo sapiens
  misc_feature (61)..(62): /note="This region represents a CpG dinucleotide"
  misc_feature (61)..(61): /note="Nucleotide may be methylated to form 5-methylcytosine"
tgtgctctgatcacgaatccagtaggccttaagtagtaggcattcaatggatgtttgttgcggctctgctttgcaggtgaacaggatttgttttttaaccagagagttaagggattttccgg

SEQ ID NO: 28569 - DNA, 122 bp, Homo sapiens
  misc_feature (61)..(62): /note="This region represents a CpG dinucleotide"
  misc_feature (61)..(61): /note="Nucleotide may be methylated to form 5-methylcytosine"
ggttttctcagtcagcagcccttccccctcccaaaggcaacagcccttcagtgagctcagcgctatttctagagccagaacagctgccgtctcgagatagcacacgacccgtcacagcaaac

SEQ ID NO: 28570 - DNA, 122 bp, Homo sapiens
  misc_feature (61)..(62): /note="This region represents a CpG dinucleotide"
  misc_feature (61)..(61): /note="Nucleotide may be methylated to form 5-methylcytosine"
gccttaatgatgaataatgtaggggcccacaaacagcacacgaattagcaggaaaccaggcgtgggtgtgcctaactacagtgcaacttggtaaataccatgccactgtatcgttacagcag

SEQ ID NO: 28571 - DNA, 122 bp, Homo sapiens
  misc_feature (61)..(62): /note="This region represents a CpG dinucleotide"
  misc_feature (61)..(61): /note="Nucleotide may be methylated to form 5-methylcytosine"
ttatgtaaccagtttatgcaagggcagccggcccgcttacataaggggaggccgggccagcgcccagctggggagggggaggctcttaaagggaccggcgtcccccgcggctccctccacgg

SEQ ID NO: 28572 - DNA, 122 bp, Homo sapiens
  misc_feature (61)..(62): /note="This region represents a CpG dinucleotide"
  misc_feature (61)..(61): /note="Nucleotide may be methylated to form 5-methylcytosine"
cttgctatttcttggtggctttcctgggttgggtcccagggatggtggatttagcaccgtcgctgtcgccctttctcctgcccatctggaagggctgggaaaagcaggccagggtgtgggca

SEQ ID NO: 28573 - DNA, 122 bp, Homo sapiens
  misc_feature (61)..(62): /note="This region represents a CpG dinucleotide"
  misc_feature (61)..(61): /note="Nucleotide may be methylated to form 5-methylcytosine"
tagtgactcgtgatcctgagcatcttttcatgagtttattttccatctgtagatcctcttcgtgtcctttgcccattttctaattggactatttgtatattttactgttgagctttgagaat

SEQ ID NO: 28574 - DNA, 122 bp, Homo sapiens
  misc_feature (61)..(62): /note="This region represents a CpG dinucleotide"
  misc_feature (61)..(61): /note="Nucleotide may be methylated to form 5-methylcytosine"
catgataaaccagatgctgccagtgatatcttggctgggtccacaagaactatcaagtgccgtgaaaggaacatgggttttagagtccaagactctgggcttgcatgctggctctgccccca

SEQ ID NO: 28575 - DNA, 122 bp, Homo sapiens
  misc_feature (61)..(62): /note="This region represents a CpG dinucleotide"
  misc_feature (61)..(61): /note="Nucleotide may be methylated to form 5-methylcytosine"
agaactagggaagcaagaaaaccacagggcatggggccagggtggcagcccccagggagccggcaggatggcagagggcaaggcgggcagcacagccggcctcttcaccaagcaggtgcaga

SEQ ID NO: 28576 - DNA, 122 bp, Homo sapiens
  misc_feature (61)..(62): /note="This region represents a CpG dinucleotide"
  misc_feature (61)..(61): /note="Nucleotide may be methylated to form 5-methylcytosine"
gcaacaatatttatgaccagcaggcgatgagaaagtgttcgcccatcacgcgatccatctcgctcccctggctgattgccatcctggagaccatccaaccaccccccggtacccccgccccc

SEQ ID NO: 28577 - DNA, 122 bp, Homo sapiens
  misc_feature (61)..(62): /note="This region represents a CpG dinucleotide"
  misc_feature (61)..(61): /note="Nucleotide may be methylated to form 5-methylcytosine"
aaaatatggagaccagtaaatcatgatagctctcctcaaagtattctatctaaactctaacggattgctcagctcattgctgctgaaaccgagactcaaaagattttatacttttaaaaaac

SEQ ID NO: 28578 - DNA, 122 bp, Homo sapiens
  misc_feature (61)..(62): /note="This region represents a CpG dinucleotide"
  misc_feature (61)..(61): /note="Nucleotide may be methylated to form 5-methylcytosine"
tgagaattgacttttctatcaagttccccagtgatgctgatgctgctggtgtgcgtaccacgttctggaacctccgctccctgctctagggccttctgggtggagccctagagctgagctcc

SEQ ID NO: 28579 - DNA, 122 bp, Homo sapiens
  misc_feature (61)..(62): /note="This region represents a CpG dinucleotide"
  misc_feature (61)..(61): /note="Nucleotide may be methylated to form 5-methylcytosine"
tctgagaacagttagagtgggtgcgtgtctgaaatgggtactcctagcagctattgtgtacgcaaagcctgagtacagcctgctggtgtcatggccacgtgtgagcaggccagcgtcacacg

SEQ ID NO: 28580 - DNA, 122 bp, Homo sapiens
  misc_feature (61)..(62): /note="This region represents a CpG dinucleotide"
  misc_feature (61)..(61): /note="Nucleotide may be methylated to form 5-methylcytosine"
agcttaggcaacagaatcacttacgaaatcctacatcaggctgtgtcactgtgtgaacctcggaaagtctgaagcttatcaagtgaagtctgaaaaattttcctgaattttacacacagggg

SEQ ID NO: 28581 - DNA, 122 bp, Homo sapiens
  misc_feature (61)..(62): /note="This region represents a CpG dinucleotide"
  misc_feature (61)..(61): /note="Nucleotide may be methylated to form 5-methylcytosine"
actctgtacaagtggtaccacttcacagcctagagctacttcccaactgggactcacacacgtccacagatactactacagcaaccatgaagctactccatggtgatgggggaaaagaaagg

SEQ ID NO: 28582 - DNA, 122 bp, Homo sapiens
  misc_feature (61)..(62): /note="This region represents a CpG dinucleotide"
  misc_feature (61)..(61): /note="Nucleotide may be methylated to form 5-methylcytosine"
tctgaaagcagttcataaaagcttagcctcatggggctaaatgaacactaagtcatcttgcggaattgcgacagagaagcatttatcctgaacaggtaccatggaagaaaaacaaaacatgt

SEQ ID NO: 28583 - DNA, 122 bp, Homo sapiens
  misc_feature (61)..(62): /note="This region represents a CpG dinucleotide"
  misc_feature (61)..(61): /note="Nucleotide may be methylated to form 5-methylcytosine"
aggagtccagcgtggattgctccaaagctcacccaccacgccctgactgcaggtgtgattcggggcccccgtggctctgctgggtccaggtgcaagcaggcacagaggtgctggcgtcagct

SEQ ID NO: 28584 - DNA, 122 bp, Homo sapiens
  misc_feature (61)..(62): /note="This region represents a CpG dinucleotide"
  misc_feature (61)..(61): /note="Nucleotide may be methylated to form 5-methylcytosine"
agtacgagggatgagggtcacttccagtttgaagcatagaagaataattaggactcttcacgcattttccttttccctgttagaggcctcaggttgaaatgatgatgtcaacaatgaaagcg

SEQ ID NO: 28585 - DNA, 122 bp, Homo sapiens
  misc_feature (61)..(62): /note="This region represents a CpG dinucleotide"
  misc_feature (61)..(61): /note="Nucleotide may be methylated to form 5-methylcytosine"
ggcgtgagccaccacacctagcctccctaagaatttgtcagtcttattattcatctctgacgcttactggcttgagtcagccctttctgtcgcataccgtgcagcttgcccgaggctgccca

SEQ ID NO: 28586 - DNA, 122 bp, Homo sapiens
  misc_feature (61)..(62): /note="This region represents a CpG dinucleotide"
  misc_feature (61)..(61): /note="Nucleotide may be methylated to form 5-methylcytosine"
ctctggtgatctgcctgcctcagcctcccaaagtgctgggattataggtgtgagccactgcgtccggcatgtgtcagatttttaaatggcactttttatgtagcaatataaatttttttaaa

SEQ ID NO: 28587 - DNA, 122 bp, Homo sapiens
  misc_feature (61)..(62): /note="This region represents a CpG dinucleotide"
  misc_feature (61)..(61): /note="Nucleotide may be methylated to form 5-methylcytosine"
acagccacgttaccccacttagaaaagtatgttactgtgaaatggaaggtaatgtgcacacgacagtgctaggctaagccataatgtagtcagagtgtattagctactctaatagtccagac

SEQ ID NO: 28588 - DNA, 122 bp, Homo sapiens
  misc_feature (61)..(62): /note="This region represents a CpG dinucleotide"
  misc_feature (61)..(61): /note="Nucleotide may be methylated to form 5-methylcytosine"
gccccaccaccagttccccccactgatgacattgccccatgtgagctccaaaactgtttccgatggcttttgtcctctctgcttcaatcctctcatctctaatatggagcaagcacttggat

SEQ ID NO: 28589 - DNA, 122 bp, Homo sapiens
  misc_feature (61)..(62): /note="This region represents a CpG dinucleotide"
  misc_feature (61)..(61): /note="Nucleotide may be methylated to form 5-methylcytosine"
caagctgtgatgctgctggttttatctctagtgaaataaagtcaaaagttatttaattcccgtcacctgtctcagtgtcatctgtgtggttggtgcagggctctcccaccccagggcccatg

SEQ ID NO: 28590 - DNA, 122 bp, Homo sapiens
  misc_feature (61)..(62): /note="This region represents a CpG dinucleotide"
  misc_feature (61)..(61): /note="Nucleotide may be methylated to form 5-methylcytosine"
acagagacaaagaaagcattgtggcttagctcttctcaacctacagttccaagacccccccgggaggttttgggtgcagcagctctatgggtatattctgaaatgccactgggctctggtgc

SEQ ID NO: 28591 - DNA, 122 bp, Homo sapiens
  misc_feature (61)..(62): /note="This region represents a CpG dinucleotide"
  misc_feature (61)..(61): /note="Nucleotide may be methylated to form 5-methylcytosine"
tattactgcttcagacctgatacaatgacaggatgtgccctgtgaaggatcctggtggcacgtgacccagcacagcatgcaggagatccatggatgaatcacaaggataactgaagaagaga

SEQ ID NO: 28592 - DNA, 122 bp, Homo sapiens
  misc_feature (61)..(62): /note="This region represents a CpG dinucleotide"
  misc_feature (61)..(61): /note="Nucleotide may be methylated to form 5-methylcytosine"
ttaacagcaaacaggatcactcttcaccagtattaaagggtttctcagctttagcaatgccgttagctactaagaatgatgctctcagtgcagacacatttgatgaagtggtggccttcagt

SEQ ID NO: 28593 - DNA, 122 bp, Homo sapiens
  misc_feature (61)..(62): /note="This region represents a CpG dinucleotide"
  misc_feature (61)..(61): /note="Nucleotide may be methylated to form 5-methylcytosine"
atcaggcagaatatccagggactcagagcttatctcccggaaactggccaagggccattgcggaaatcaggcctttcttgggaatgtatagggtttgagcaactcagatctcctgagctaac

SEQ ID NO: 28594 - DNA, 122 bp, Homo sapiens
  misc_feature (61)..(62): /note="This region represents a CpG dinucleotide"
  misc_feature (61)..(61): /note="Nucleotide may be methylated to form 5-methylcytosine"
gaagtggcaataaaagaaagggctattggaatgtggagatggtggtaggaaggaaagaagcgagtcacagagagcagttgtacaagatgctaaagcccatgtgccctccattttaacagact

SEQ ID NO: 28595 - DNA, 122 bp, Homo sapiens
  misc_feature (61)..(62): /note="This region represents a CpG dinucleotide"
  misc_feature (61)..(61): /note="Nucleotide may be methylated to form 5-methylcytosine"
acctctccaaaatgctggaatatttgaagcatgtacttcactcttctctctcacttctgacgaagaaacaagttggatgtcttttctcaatggtgctgagtcatcccagtctctgtctttgg

SEQ ID NO: 28596 - DNA, 122 bp, Homo sapiens
  misc_feature (61)..(62): /note="This region represents a CpG dinucleotide"
  misc_feature (61)..(61): /note="Nucleotide may be methylated to form 5-methylcytosine"
tagtcacacggagagagaagaaaggagattagcagggtgactttcaccctgcaacagtcacgctggagtactctggtgaaggatcaagaatattaccagttttctgatgaagaaaggaatat

SEQ ID NO: 28597 - DNA, 122 bp, Homo sapiens
  misc_feature (61)..(62): /note="This region represents a CpG dinucleotide"
  misc_feature (61)..(61): /note="Nucleotide may be methylated to form 5-methylcytosine"
atagccattactattgcttaacaaagtccctggtgagtcacacaaggccttctgaaacttcgtccctgtttcctgtctcccctcacattcctttgtgctttgtactttatatactgcacttt

SEQ ID NO: 28598 - DNA, 122 bp, Homo sapiens
  misc_feature (61)..(62): /note="This region represents a CpG dinucleotide"
  misc_feature (61)..(61): /note="Nucleotide may be methylated to form 5-methylcytosine"
ttccacaccagttgtgtgatcttggaaaagtttcttgacttctctgtgcctcactttttacgatagggctctgagaggattaaatgagacttttgtgaaatacttggcccaatgtctagcac

SEQ ID NO: 28599 - DNA, 122 bp, Homo sapiens
  misc_feature (61)..(62): /note="This region represents a CpG dinucleotide"
  misc_feature (61)..(61): /note="Nucleotide may be methylated to form 5-methylcytosine"
gtggcagggccagcaaacaaagtggcagtgtgtgaggaacaaagatgtggtcacatgaaacgctgggagtagcattgctggggaaaccaagaatgaatacaagtgcagggtggaggcgtgga

SEQ ID NO: 28600 - DNA, 122 bp, Homo sapiens
  misc_feature (61)..(62): /note="This region represents a CpG dinucleotide"
  misc_feature (61)..(61): /note="Nucleotide may be methylated to form 5-methylcytosine"
aggctacatgtggtcaaactttagtctgcagtttctcagtcagagactcagtgagggaaccggcccccactgtcctcatatgtgcaaatttgaagttgacctcatagcttctcatgaacaat

SEQ ID NO: 28601 - DNA, 122 bp, Homo sapiens
  misc_feature (61)..(62): /note="This region represents a CpG dinucleotide"
  misc_feature (61)..(61): /note="Nucleotide may be methylated to form 5-methylcytosine"
tggaactcaggatatatgttcccacagccacagtggccccaagttggtcaggctgtcaggcggctccagaaaccacacaccccatgacatgaggaagccacagacagagacacccagtttcc

SEQ ID NO: 28602 - DNA, 122 bp, Homo sapiens
  misc_feature (61)..(62): /note="This region represents a CpG dinucleotide"
  misc_feature (61)..(61): /note="Nucleotide may be methylated to form 5-methylcytosine"
ttgtgccctaacagatcttatggtctgacaggcaagagacattgaacaagtaattacagtcgcatgtgatgaatgtcaagctgggctgatacacagttcttttggaacaagcagctagggga

SEQ ID NO: 28603 - DNA, 122 bp, Homo sapiens
  misc_feature (61)..(62): /note="This region represents a CpG dinucleotide"
  misc_feature (61)..(61): /note="Nucleotide may be methylated to form 5-methylcytosine"
tggactttcccatgctgggcctggaggcagtgacacatgatgaagggaccactcaggattcgtcacagaaccacaggcagctggggctgtgagtgcctgaggggagcttggctgtgagtcta

SEQ ID NO: 28604 - DNA, 122 bp, Homo sapiens
  misc_feature (61)..(62): /note="This region represents a CpG dinucleotide"
  misc_feature (61)..(61): /note="Nucleotide may be methylated to form 5-methylcytosine"
gaggataaaaagccagaactcactttggtggcgcctgcagacctctgcactgtaatgacacgagtgcaagctgcactgggtgcaagtcagcatgactcagccaccctccccacggggtgaga

SEQ ID NO: 28605 - DNA, 122 bp, Homo sapiens
  misc_feature (61)..(62): /note="This region represents a CpG dinucleotide"
  misc_feature (61)..(61): /note="Nucleotide may be methylated to form 5-methylcytosine"
tgagcagatccatgtctagagagagggaagtgagtcacctgaggtgaccggtgaaggtgacggagagggagttaaccgagacagagaagattccgtagatggtagaacattgttagaatcag

SEQ ID NO: 28606 - DNA, 122 bp, Homo sapiens
  misc_feature (61)..(62): /note="This region represents a CpG dinucleotide"
  misc_feature (61)..(61): /note="Nucleotide may be methylated to form 5-methylcytosine"
tgattaagagtaaagacacttacccttaatcatttcatgaaactcttgtaaatgtattatcgcatgttctctgttctttcatctgggtcctgcacatctgttccttggtgattcctatcagt

SEQ ID NO: 28607 - DNA, 122 bp, Homo sapiens
  misc_feature (61)..(62): /note="This region represents a CpG dinucleotide"
  misc_feature (61)..(61): /note="Nucleotide may be methylated to form 5-methylcytosine"
gtgtcctttctgtggaaacttgagaactgagtagatggcagcatgtgtcactctcataggcgcaagaagctgtggaaactgctgcttgctgacttcagctcccccacaccctccaccctcca

SEQ ID NO: 28608 - DNA, 122 bp, Homo sapiens
  misc_feature (61)..(62): /note="This region represents a CpG dinucleotide"
  misc_feature (61)..(61): /note="Nucleotide may be methylated to form 5-methylcytosine"
tatcacctgagggaaaagcaggctgccccagagggcctcccaggacagcactcatgaccacgtcctccttggccttgctaccaccacacctcattctcaggacatcaagagcagctctctct

SEQ ID NO: 28609 - DNA, 122 bp, Homo sapiens
  misc_feature (61)..(62): /note="This region represents a CpG dinucleotide"
  misc_feature (61)..(61): /note="Nucleotide may be methylated to form 5-methylcytosine"
acttgagaatccctgatgatatttaagacagaaaaactacagaatctaatgcaaagtccacggccaaactgtgctgggatagggttgcctagtggtccattcatcattttttttttctgctt

SEQ ID NO: 28610 - DNA, 122 bp, Homo sapiens
  misc_feature (61)..(62): /note="This region represents a CpG dinucleotide"
  misc_feature (61)..(61): /note="Nucleotide may be methylated to form 5-methylcytosine"
tcctccttcagagaattctcagaggaccacaaactccactcaaagagcatgtgtttcatacgtatctgtccagagaaaaaggaaactctgatgtccaaaataaacggagaatattatatgtt

SEQ ID NO: 28611 - DNA, 122 bp, Homo sapiens
  misc_feature (61)..(62): /note="This region represents a CpG dinucleotide"
  misc_feature (61)..(61): /note="Nucleotide may be methylated to form 5-methylcytosine"
cacgtggagacggacactgagggcgcggcgggcgcggggcctggggggcgcctgacacgccggccgtccttcagctcgcaccacctcatgccctgcgacactctggcgcgccgccgcctggc

SEQ ID NO: 28612 - DNA, 122 bp, Homo sapiens
  misc_feature (61)..(62): /note="This region represents a CpG dinucleotide"
  misc_feature (61)..(61): /note="Nucleotide may be methylated to form 5-methylcytosine"
atctaccaggagcaaataaactagactcacacaaactaaaaatagcccatgtttttcagccgtcgccagggagtaagttgaagctgtctctcacatgctagaaggagtaggaagttcaatgg

SEQ ID NO: 28613 - DNA, 122 bp, Homo sapiens
  misc_feature (61)..(62): /note="This region represents a CpG dinucleotide"
  misc_feature (61)..(61): /note="Nucleotide may be methylated to form 5-methylcytosine"
gggtggattcaggaagtggcatgcaacacacatgcgtagaagaccctgtggatcagcccccgctatgggcttctccagggagaccacagaaggtataggtagattttctccggatgtgcaac

SEQ ID NO: 28614 - DNA, 122 bp, Homo sapiens
  misc_feature (61)..(62): /note="This region represents a CpG dinucleotide"
  misc_feature (61)..(61): /note="Nucleotide may be methylated to form 5-methylcytosine"
tgcccggggatgagcagtcacttcagataaacgttgaggtttctgttaccagccgtcctccgggcccagtgtgattagtctactttgctcagcttcctgtaggtgtgttgtgatactctgta

SEQ ID NO: 28615 - DNA, 122 bp, Homo sapiens
  misc_feature (61)..(62): /note="This region represents a CpG dinucleotide"
  misc_feature (61)..(61): /note="Nucleotide may be methylated to form 5-methylcytosine"
aagatgctcttgtctcacaggccgtgaggaacagctttggcatgtgctgaagaagaggaccgcaaaggaactggatgagacagcataaggcagcctctataaacctttttggttcctgtatt

SEQ ID NO: 28616 - DNA, 122 bp, Homo sapiens
  misc_feature (61)..(62): /note="This region represents a CpG dinucleotide"
  misc_feature (61)..(61): /note="Nucleotide may be methylated to form 5-methylcytosine"
ctctcagtttcctgacccacagaactgtgagagaaatgttatttcaaactgctaagtcttcggtaattacacaacaatagataactaatagtgtgtgttataagtatcttctattccttgcc

SEQ ID NO: 28617 - DNA, 122 bp, Homo sapiens
  misc_feature (61)..(62): /note="This region represents a CpG dinucleotide"
  misc_feature (61)..(61): /note="Nucleotide may be methylated to form 5-methylcytosine"
agttggccagagacccttcagacctcattgaatcagctgggtcacaagtgccaagttgctcgcagtgcagcctggaccggctctggaacttctcattgtcaaagctaagagtcaattgagtc

SEQ ID NO: 28618 - DNA, 122 bp, Homo sapiens
  misc_feature (61)..(62): /note="This region represents a CpG dinucleotide"
  misc_feature (61)..(61): /note="Nucleotide may be methylated to form 5-methylcytosine"
gtttaaatgtgatgcctacacatagctcagcatgtttgcactgcatgtcttgtattgttccgtgtgatgccctgtctgcctccttccttgtgattccagtgtgccgggcatggcaggagaca

SEQ ID NO: 28619 - DNA, 122 bp, Homo sapiens
  misc_feature (61)..(62): /note="This region represents a CpG dinucleotide"
  misc_feature (61)..(61): /note="Nucleotide may be methylated to form 5-methylcytosine"
gagacatgatttcaggggctttaatttattcacaaaatgtcgtcgttgaaattcatcgtacgggcccaggaaactcttcacaggtggtgaatgtgccaagcaaagcctcatggccacatcca

SEQ ID NO: 28620 - DNA, 122 bp, Homo sapiens
  misc_feature (61)..(62): /note="This region represents a CpG dinucleotide"
  misc_feature (61)..(61): /note="Nucleotide may be methylated to form 5-methylcytosine"
ctgtaaaaggagccacagaagctaaattggccttggactgtggaaaagacagctgaataacggcaagagctaagaaactatttaacatcccactttcaatagcaacagttttacaaacagga

SEQ ID NO: 28621 - DNA, 122 bp, Homo sapiens
  misc_feature (61)..(62): /note="This region represents a CpG dinucleotide"
  misc_feature (61)..(61): /note="Nucleotide may be methylated to form 5-methylcytosine"
ttcaccaaatccatttctctttcctccagggcacttagtcaccttttccagcctcccttacggttagatattgccactgagtctggccttatggaatgcagctatgtcacttccaggtctga

SEQ ID NO: 28622 - DNA, 122 bp, Homo sapiens
  misc_feature (61)..(62): /note="This region represents a CpG dinucleotide"
  misc_feature (61)..(61): /note="Nucleotide may be methylated to form 5-methylcytosine"
gaccctggcaagacactgtttggctactatcactgcatcacaacttcgtggtgtaaaactcgcagggtcctgtgggtcaggatagcaggcatagcataaggagagacagtttgtcctgatac

SEQ ID NO: 28623 - DNA, 122 bp, Homo sapiens
  misc_feature (61)..(62): /note="This region represents a CpG dinucleotide"
  misc_feature (61)..(61): /note="Nucleotide may be methylated to form 5-methylcytosine"
gtgctgggattataggcatgagccaaggattgcctttccttgaaagtgactcatacgctccgctttcctccacagtcatttcaccctctccctggtttggtaactgaagccttctgaaatga

SEQ ID NO: 28624 - DNA, 122 bp, Homo sapiens
  misc_feature (61)..(62): /note="This region represents a CpG dinucleotide"
  misc_feature (61)..(61): /note="Nucleotide may be methylated to form 5-methylcytosine"
taggacttggttccatccttggtcacagccgctgaccttcaagagccccttctatatctgcgtttcaccaccaggtagaggcacccagcctcttgggctcactgtcaccgtctgtttgccaa

SEQ ID NO: 28625 - DNA, 122 bp, Homo sapiens
  misc_feature (61)..(62): /note="This region represents a CpG dinucleotide"
  misc_feature (61)..(61): /note="Nucleotide may be methylated to form 5-methylcytosine"
accaacatcataactgaaaggtgggttagttgttcacatgccgagtccaattaacaagaacgaggcctgatacaaagcaagtgaattgattctgaagctattatagcttggggaagatgtac

SEQ ID NO: 28626 - DNA, 122 bp, Homo sapiens
  misc_feature (61)..(62): /note="This region represents a CpG dinucleotide"
  misc_feature (61)..(61): /note="Nucleotide may be methylated to form 5-methylcytosine"
tctttacagtgaccctgtaaagaccttgaaagcttttctgtaggtctgacccagaaatgacgcaaacatctctcacttctctcttttcaacccaccaatttacttttttgcagaagtactct

SEQ ID NO: 28627 - DNA, 122 bp, Homo sapiens
  misc_feature (61)..(62): /note="This region represents a CpG dinucleotide"
  misc_feature (61)..(61): /note="Nucleotide may be methylated to form 5-methylcytosine"
ctccctcttcccatatatttcccttcatagaaccacaggtattctatgcttctatttttacgttcacagaatttccttgcaggtttttttttttttttaattacccaagtttgggtgacccc

SEQ ID NO: 28628 - DNA, 122 bp, Homo sapiens
  misc_feature (61)..(62): /note="This region represents a CpG dinucleotide"
  misc_feature (61)..(61): /note="Nucleotide may be methylated to form 5-methylcytosine"
gagagtatggatggggttggggaggagggggttagtgtggcctagcagaagagtagcagacgaagctgaagatgtaagtagtggccagatcataagggccttaataatctttttaagaagtt

SEQ ID NO: 28629 - DNA, 122 bp, Homo sapiens
  misc_feature (61)..(62): /note="This region represents a CpG dinucleotide"
  misc_feature (61)..(61): /note="Nucleotide may be methylated to form 5-methylcytosine"
tgcacacatgattccgtgtgcatgtcacaccctctgtatgcatggagtgcattcttgtctcgcggaactctgcacacatagtaaatattttgctgtcggtttatcttggcttccacatgtct

SEQ ID NO: 28630 - DNA, 122 bp, Homo sapiens
  misc_feature (61)..(62): /note="This region represents a CpG dinucleotide"
  misc_feature (61)..(61): /note="Nucleotide may be methylated to form 5-methylcytosine"
aatgacttgggcctgaccctgtgactcaaagctcatgtttcaccaggtgactattgcacccgggagttctcagggccccaagcctaaaggagaaacctgaatcattacatctcctctcctcg

SEQ ID NO: 28631 - DNA, 122 bp, Homo sapiens
  misc_feature (61)..(62): /note="This region represents a CpG dinucleotide"
  misc_feature (61)..(61): /note="Nucleotide may be methylated to form 5-methylcytosine"
agatacacgggacttgcctagaaaagctgctttttcattgtccttccttttggggcagaacgctttcagtagtcagcaatcatgtggttgagtttgaaactgaccagccaggaggttgtggg

SEQ ID NO: 28632 - DNA, 122 bp, Homo sapiens
  misc_feature (61)..(62): /note="This region represents a CpG dinucleotide"
  misc_feature (61)..(61): /note="Nucleotide may be methylated to form 5-methylcytosine"
ccaacaccacagatcgtgcaaagagaagataaccatcaaagagagtacacatcgacgcggcgcccagtccagaaagatagagcgctgcagcaccattcagccacaggcagcatttttcaaag

SEQ ID NO: 28633 - DNA, 122 bp, Homo sapiens
  misc_feature (61)..(62): /note="This region represents a CpG dinucleotide"
  misc_feature (61)..(61): /note="Nucleotide may be methylated to form 5-methylcytosine"
agaggaactctccactaattgaatttgagatgactcactctaaactagggacttgaaactcgaaaaccttggcagcaataccttggcagtgaaattcttgggtcatattgtccagctcattg

SEQ ID NO: 28634 - DNA, 122 bp, Homo sapiens
  misc_feature (61)..(62): /note="This region represents a CpG dinucleotide"
  misc_feature (61)..(61): /note="Nucleotide may be methylated to form 5-methylcytosine"
gattagaaaaagaatttaacaacatcatgcatttaacttggactttagccactacactcacgtcaacaaacttacttattttcattcttgcttaatctaggttgagtctatgaattacttta

SEQ ID NO: 28635 - DNA, 122 bp, Homo sapiens
  misc_feature (61)..(62): /note="This region represents a CpG dinucleotide"
  misc_feature (61)..(61): /note="Nucleotide may be methylated to form 5-methylcytosine"
ggagggagaagggggcttcagcacacggcagcgcgtggcccctgggcccgaccccttctccggcagcgcagcagtcctccaccttgtcttgctaattcccagccactgccccgcctcaggtc

SEQ ID NO: 28636 - DNA, 122 bp, Homo sapiens
  misc_feature (61)..(62): /note="This region represents a CpG dinucleotide"
  misc_feature (61)..(61): /note="Nucleotide may be methylated to form 5-methylcytosine"
ttaagcctagctgaaattcttttcaaggttggtcattctcaaatgccagagagggttgcccggctctctctgctcttgccccattccattcacaacaggaggtggggaatgagctcagatga

SEQ ID NO: 28637 - DNA, 122 bp, Homo sapiens
  misc_feature (61)..(62): /note="This region represents a CpG dinucleotide"
  misc_feature (61)..(61): /note="Nucleotide may be methylated to form 5-methylcytosine"
cttaaaactgccatccacccccgcgcggggcgccgcaggggctgctccgggcggtgccagcggctcaagcacaaagtagccagacagataagaaaggagggactgtcacaaggatccgagtt

SEQ ID NO: 28638 - DNA, 122 bp, Homo sapiens
  misc_feature (61)..(62): /note="This region represents a CpG dinucleotide"
  misc_feature (61)..(61): /note="Nucleotide may be methylated to form 5-methylcytosine"
aacccagcaatctctctcctgtacccaggaaaaacccgtgcatgtgatcacccaaggatacgcacatgggtctatagcacaaatgggaaacaatccaggcgtctgtcaacaggaggatagat

SEQ ID NO: 28639 - DNA, 122 bp, Homo sapiens
  misc_feature (61)..(62): /note="This region represents a CpG dinucleotide"
  misc_feature (61)..(61): /note="Nucleotide may be methylated to form 5-methylcytosine"
tgtttaagtgactggcccatttacatctttcaatgtccctcccagcaggtataataaccacggccaacaacaactggcaagagtgaagtgcttgctgtgagcaaagccctgttttaagccct

SEQ ID NO: 28640 - DNA, 122 bp, Homo sapiens
  misc_feature (61)..(62): /note="This region represents a CpG dinucleotide"
  misc_feature (61)..(61): /note="Nucleotide may be methylated to form 5-methylcytosine"
ctcaggtgatctgcctgcctcggattcccaaagtgctgggattacaggcatgagccaccgcgcccggcctaagatttgttcttaatgtgatggtgtaattggccagatctggatctgaaatt

SEQ ID NO: 28641 - DNA, 122 bp, Homo sapiens
  misc_feature (61)..(62): /note="This region represents a CpG dinucleotide"
  misc_feature (61)..(61): /note="Nucleotide may be methylated to form 5-methylcytosine"
gagatctgaaagccaagtgttcagcaaaatgctgggcaggctccccagcctgcgcggccacgcacctttacaccacgccgcgctgccccagcctgcgtgctgcaaacgacgcatttgacctc

SEQ ID NO: 28642 - DNA, 122 bp, Homo sapiens
  misc_feature (61)..(62): /note="This region represents a CpG dinucleotide"
  misc_feature (61)..(61): /note="Nucleotide may be methylated to form 5-methylcytosine"
ctatttcgtagtgacagccagctgctatttcctactctgtggtcacaagctgattgtatccgtgaccctagcctcccaacttgcaaacatgtgctcctagccacaaggagacagcgtgaggg

SEQ ID NO: 28643 - DNA, 122 bp, Homo sapiens
  misc_feature (61)..(62): /note="This region represents a CpG dinucleotide"
  misc_feature (61)..(61): /note="Nucleotide may be methylated to form 5-methylcytosine"
gcttatattgttatatcctatttactcgaggtcatacatgcccaggctggattgagactccgtcccaaggtttctgaatcccagttccatgctctttccacattttcatcctgcagcctgag

SEQ ID NO: 28644 - DNA, 122 bp, Homo sapiens
  misc_feature (61)..(62): /note="This region represents a CpG dinucleotide"
  misc_feature (61)..(61): /note="Nucleotide may be methylated to form 5-methylcytosine"
tggcagacgatgggtgttagtccaggcttggggttgtgttccggtcacctgctcctctgacgcaggcagtgagacccatttctcagaacacttgggacagagcccagcccttgggtggaggt

SEQ ID NO: 28645 - DNA, 122 bp, Homo sapiens
  misc_feature (61)..(62): /note="This region represents a CpG dinucleotide"
  misc_feature (61)..(61): /note="Nucleotide may be methylated to form 5-methylcytosine"
ggcttttcccggcccgcgggcctgggcgctccgggggagggagctccaagggcagggtggcgggggagccgcagctcctccacgttatggaagaaaggggaatgctagccccctgcgcctcc

SEQ ID NO: 28646 - DNA, 122 bp, Homo sapiens
  misc_feature (61)..(62): /note="This region represents a CpG dinucleotide"
  misc_feature (61)..(61): /note="Nucleotide may be methylated to form 5-methylcytosine"
ttttcatttttcactggggcctgcaaagtaggtcgctgatcttgaagccatttatgcactcgttgtgatgatggagtctttcttgaatcgtatcagaaacctctgtgaatcagaaggcctgg

SEQ ID NO: 28647 - DNA, 122 bp, Homo sapiens
  misc_feature (61)..(62): /note="This region represents a CpG dinucleotide"
  misc_feature (61)..(61): /note="Nucleotide may be methylated to form 5-methylcytosine"
gaggcacctatatgagaagctttgtgatcccttttatttcaagaaggcttctatttgggacgtggagcttacggttaatccacatttcagagggtattattgcaaattagtcaacaaatctc

SEQ ID NO: 28648 - DNA, 122 bp, Homo sapiens
  misc_feature (61)..(62): /note="This region represents a CpG dinucleotide"
  misc_feature (61)..(61): /note="Nucleotide may be methylated to form 5-methylcytosine"
tcagcaggtgcataaattatttcttcctttagttccactccactggtgactcttaggtcacgttcctccatcccacaatgcaaattcacgcagatggcatttgctattctacagtacatttg

SEQ ID NO: 28649 - DNA, 122 bp, Homo sapiens
  misc_feature (61)..(62): /note="This region represents a CpG dinucleotide"
  misc_feature (61)..(61): /note="Nucleotide may be methylated to form 5-methylcytosine"
tccacctgggccaggcccgcatctgctgcccagcaacgagtgcgtggagctcttcagaaccgcctacttctgcagaggtgaggctgttctctctgggcacatgagcttccaccccctacctc

SEQ ID NO: 28650 - DNA, 122 bp, Homo sapiens
  misc_feature (61)..(62): /note="This region represents a CpG dinucleotide"
  misc_feature (61)..(61): /note="Nucleotide may be methylated to form 5-methylcytosine"
tctctacaggtcagggaagtcaaagatgcatccctgagttcttcctagcaggcaagcagccgtgcaccaatgacatggccaaaagcaattctgttggccaggacagctgtcaggactctgag

SEQ ID NO: 28651 - DNA, 122 bp, Homo sapiens
  misc_feature (61)..(62): /note="This region represents a CpG dinucleotide"
  misc_feature (61)..(61): /note="Nucleotide may be methylated to form 5-methylcytosine"
acacatttcatcaaaaaagatgtacagatgacagctaagcccatgaaaagtgctcagcatcgttagtcactggaggaatgcaaattacagctgtaatgataactcgacacacctactgaaat

SEQ ID NO: 28652 - DNA, 122 bp, Homo sapiens
  misc_feature (61)..(62): /note="This region represents a CpG dinucleotide"
  misc_feature (61)..(61): /note="Nucleotide may be methylated to form 5-methylcytosine"
agagagagagagagggagaaatttaaaagtattaagtcacccatcctacctgagcacccacgagctgcagcaatgctgagttcacagggaggagctcaatgtctgtattgatagtggtctgg

SEQ ID NO: 28653 - DNA, 122 bp, Homo sapiens
  misc_feature (61)..(62): /note="This region represents a CpG dinucleotide"
  misc_feature (61)..(61): /note="Nucleotide may be methylated to form 5-methylcytosine"
atttcctcaccaatgatgcagagagctacctcacaggcttgccctaaagattaaaccacacgacggaagagcctgacctatgagtcaacaagggctagctgctgtgtggctgtcccaggcca

SEQ ID NO: 28654 - DNA, 122 bp, Homo sapiens
  misc_feature (61)..(62): /note="This region represents a CpG dinucleotide"
  misc_feature (61)..(61): /note="Nucleotide may be methylated to form 5-methylcytosine"
ttgtccataacttatttatataaggctgtccggagtagcagtgtttaactctgctgggtacgcagataggaggtggggcttgagtcgttgtttgctaagtcagagggtaatccataaatact

SEQ ID NO: 28655 - DNA, 122 bp, Homo sapiens
  misc_feature (61)..(62): /note="This region represents a CpG dinucleotide"
  misc_feature (61)..(61): /note="Nucleotide may be methylated to form 5-methylcytosine"
caggaatggatactgctgctgtcgttgtgtgtgacatatcccttagcctccttgttggtccgtcctctggccctatgtcttcatggctcttgcccctcttccttcttcactatctgactcaa

SEQ ID NO: 28656 - DNA, 122 bp, Homo sapiens
  misc_feature (61)..(62): /note="This region represents a CpG dinucleotide"
  misc_feature (61)..(61): /note="Nucleotide may be methylated to form 5-methylcytosine"
ctgtttgttttgagtcttcaactcctctcctgtgcctccccacccccacagaactgcaagcgcagacatctcatctgggcagcgccgtggatccctgcttagtctgcccaccctgctttaca

SEQ ID NO: 28657 - DNA, 122 bp, Homo sapiens
  misc_feature (61)..(62): /note="This region represents a CpG dinucleotide"
  misc_feature (61)..(61): /note="Nucleotide may be methylated to form 5-methylcytosine"
agtcactagggggtgtgctgcataatataaggcatgtacaccctgtcacccttctgaaatcggtaaaactctgaattttgaaacaaatctaaccccaaggattttggacctgaatgagatat

SEQ ID NO: 28658 - DNA, 122 bp, Homo sapiens
  misc_feature (61)..(62): /note="This region represents a CpG dinucleotide"
  misc_feature (61)..(61): /note="Nucleotide may be methylated to form 5-methylcytosine"
ccatacagtacttagcatagaacatgccacagacttaacaaaacaactgatgctttactgcgtccttaccatgtgccaggaacccttttaagctctcatgcctattaactaatttatacttc

SEQ ID NO: 28659 - DNA, 122 bp, Homo sapiens
  misc_feature (61)..(62): /note="This region represents a CpG dinucleotide"
  misc_feature (61)..(61): /note="Nucleotide may be methylated to form 5-methylcytosine"
gtgtctactacacatttggcacatttcacacatcttttttaatactcataacatacctgacgctcagaggagacacaaggattgccctgggattccagactagtgagtgatagagctaggct

SEQ ID NO: 28660 - DNA, 122 bp, Homo sapiens
  misc_feature (61)..(62): /note="This region represents a CpG dinucleotide"
  misc_feature (61)..(61): /note="Nucleotide may be methylated to form 5-methylcytosine"
ccggaagagctttcggccggagggtccaggatatacagtatctgcttcatgtcctggggtcgtgatgaagggtggcaacaacttgtgagctttacgttgactgggtgcctacccagcccttg

SEQ ID NO: 28661 - DNA, 122 bp, Homo sapiens
  misc_feature (61)..(62): /note="This region represents a CpG dinucleotide"
  misc_feature (61)..(61): /note="Nucleotide may be methylated to form 5-methylcytosine"
agaggttggaatgtgtaagatacacatttcatcaatgcaaaaataccagaaggtggcaaacgtggactttggtagaggcatggcacaggaaaattgctgttcataagtccacataggtgtgt

SEQ ID NO: 28662 - DNA, 122 bp, Homo sapiens
  misc_feature (61)..(62): /note="This region represents a CpG dinucleotide"
  misc_feature (61)..(61): /note="Nucleotide may be methylated to form 5-methylcytosine"
gcggggagtcccagcctgggatctttgcctcatgtccttgggctcctgccctggctggcccgtcccccaccgccatgaggtgtcagattgtgtttccggctgcctcttcccgttgaccccct

SEQ ID NO: 28663 - DNA, 122 bp, Homo sapiens
  misc_feature (61)..(62): /note="This region represents a CpG dinucleotide"
  misc_feature (61)..(61): /note="Nucleotide may be methylated to form 5-methylcytosine"
acaggaaaacaggggcctgaggtgaatagcctgagctgggaaaagaaacacaatttccagcgcgttggatcaggtccctgagtttcaggaataaagccaccttgtcagactctcctggactg

SEQ ID NO: 28664 - DNA, 122 bp, Homo sapiens
  misc_feature (61)..(62): /note="This region represents a CpG dinucleotide"
  misc_feature (61)..(61): /note="Nucleotide may be methylated to form 5-methylcytosine"
gcagaacagctctctcctctacccccagctctgttgggatctgaggtgaggcgctggaggcgggatggagagcagtggaaaaggaggtatctgataccctgcagtaagcttctttttcctgt

SEQ ID NO: 28665 - DNA, 122 bp, Homo sapiens
  misc_feature (61)..(62): /note="This region represents a CpG dinucleotide"
  misc_feature (61)..(61): /note="Nucleotide may be methylated to form 5-methylcytosine"
caggtgtcctttcccagtagagtcttatggacagtgattaattctctcagcaacagtgtgcgatgacaggcatgaagtattgcaaccaggaagctcacctgagccttggtgtcctgggtttt

SEQ ID NO: 28666 - DNA, 122 bp, Homo sapiens
  misc_feature (61)..(62): /note="This region represents a CpG dinucleotide"
  misc_feature (61)..(61): /note="Nucleotide may be methylated to form 5-methylcytosine"
taggttcagtacccatctctgaacccattgctttctccaggggaaggaattgtaccaatccgcttaggtctagacagcatgcctggacaggactagctcctcagaagcacctgggctgcctg

SEQ ID NO: 28667 - DNA, 122 bp, Homo sapiens
  misc_feature (61)..(62): /note="This region represents a CpG dinucleotide"
  misc_feature (61)..(61): /note="Nucleotide may be methylated to form 5-methylcytosine"
acccctgtcccctgaagataaatgatcgcagctgcaaatttcaaacagtgtgacgtgctgcggtcggcagccaagacaaaaaacccacagacgtttggcctttgaggcagaggaacaccacg

SEQ ID NO: 28668 - DNA, 122 bp, Homo sapiens
  misc_feature (61)..(62): /note="This region represents a CpG dinucleotide"
  misc_feature (61)..(61): /note="Nucleotide may be methylated to form 5-methylcytosine"
ggaccactctcacttaactctctctagctgccttaacattctgtttgttcttgtcattctcgcaaagttctaaaacaggctatttgaaattaagcacttccccccagcaactccgtgaatta

SEQ ID NO: 28669 - DNA, 122 bp, Homo sapiens
  misc_feature (61)..(62): /note="This region represents a CpG dinucleotide"
  misc_feature (61)..(61): /note="Nucleotide may be methylated to form 5-methylcytosine"
gctgcctcttgtcatctccaatccagatccgtttcattgacttaactcctggctgaataccgccagttaattacagcaatcacagaccttcctgctccagccacgcggtgagaatgagggtt

SEQ ID NO: 28670 - DNA, 122 bp, Homo sapiens
  misc_feature (61)..(62): /note="This region represents a CpG dinucleotide"
  misc_feature (61)..(61): /note="Nucleotide may be methylated to form 5-methylcytosine"
ttcagtagcctgagtcccttcttctttttctttcacgttactagggcagttgttcgctgacgccttaattctggaacacgttccttgcccagattcttggtggctgcttgttcccttctcat

SEQ ID NO: 28671 - DNA, 122 bp, Homo sapiens
  misc_feature (61)..(62): /note="This region represents a CpG dinucleotide"
  misc_feature (61)..(61): /note="Nucleotide may be methylated to form 5-methylcytosine"
tacctggtggcaggtgtcatttccccattctacacgtacctgaggctcagagtgagacagcgactcacccaagatctcccagctacaaaatggcagagcctgggcctgagctagcatggtca

SEQ ID NO: 28672 - DNA, 122 bp, Homo sapiens
  misc_feature (61)..(62): /note="This region represents a CpG dinucleotide"
  misc_feature (61)..(61): /note="Nucleotide may be methylated to form 5-methylcytosine"
acccatattgggaacacaaaatcagttaatgcttccgatataaaagaggaactagctgtgcgtctcagaaattctcagcacagcctttaaggttccaaacatctgctagaagaggaatgcag

SEQ ID NO: 28673 - DNA, 122 bp, Homo sapiens
  misc_feature (61)..(62): /note="This region represents a CpG dinucleotide"
  misc_feature (61)..(61): /note="Nucleotide may be methylated to form 5-methylcytosine"
tttacactgcgttaggtattatgagtaatctagagatgatttaaagtgtacaggaggatgcgtgtgggtgatatgcaagtactatgccattttatgtcaaggacttgagcattctcaatttt

SEQ ID NO: 28674 - DNA, 122 bp, Homo sapiens
  misc_feature (61)..(62): /note="This region represents a CpG dinucleotide"
  misc_feature (61)..(61): /note="Nucleotide may be methylated to form 5-methylcytosine"
gcgctggccacagaggcctcccagcaggtcacaggggctgaacgaggcctgggcttggagcgtggccctcgagggggctggcacgggtttgcagctgctgctgcagtttgagtgtttggccc

SEQ ID NO: 28675 - DNA, 122 bp, Homo sapiens
  misc_feature (61)..(62): /note="This region represents a CpG dinucleotide"
  misc_feature (61)..(61): /note="Nucleotide may be methylated to form 5-methylcytosine"
aatctattaggcaatttctgcagtgggaggagaacacaaatactgctattctagttcttccgcttcctggtggctggtgatcccaggctatgattccagaaggcccaagcttctgcacacct

SEQ ID NO: 28676 - DNA, 122 bp, Homo sapiens
  misc_feature (61)..(62): /note="This region represents a CpG dinucleotide"
  misc_feature (61)..(61): /note="Nucleotide may be methylated to form 5-methylcytosine"
ttcacctatctgatgctgctcaaatgccagagtgctttaatgtgtctttcgcagtatagacggcccaggccctagcctgagattcagaccctgcccagttgagcaaaaggagaaagagatgc

SEQ ID NO: 28677 - DNA, 122 bp, Homo sapiens
  misc_feature (61)..(62): /note="This region represents a CpG dinucleotide"
  misc_feature (61)..(61): /note="Nucleotide may be methylated to form 5-methylcytosine"
ttccgatcggctgtgggggtggaggagaaagccccccttgctctgcatgcctctgcgtgccgttcggtgtcagagtcacagagtgggaaccgctccagaggctgatgtcattccccaggttt

SEQ ID NO: 28678 - DNA, 122 bp, Homo sapiens
  misc_feature (61)..(62): /note="This region represents a CpG dinucleotide"
  misc_feature (61)..(61): /note="Nucleotide may be methylated to form 5-methylcytosine"
actgactagtaccaaccagacctaataaagctcagcattctttttcatctcttggctccccgcccttttctcacagtggcattgccaaaccttttctactctttcttaagaatttgtgctgg

SEQ ID NO: 28679 - DNA, 122 bp, Homo sapiens
  misc_feature (61)..(62): /note="This region represents a CpG dinucleotide"
  misc_feature (61)..(61): /note="Nucleotide may be methylated to form 5-methylcytosine"
ctgtcctcaggcatccgaaggcgtctccatgaggttcttcaccaagctggaccagctcatcgagttttacaagaaggaaaacatggggctggtgacccatctgcaataccctgtgccgctgg

SEQ ID NO: 28680 - DNA, 122 bp, Homo sapiens
  misc_feature (61)..(62): /note="This region represents a CpG dinucleotide"
  misc_feature (61)..(61): /note="Nucleotide may be methylated to form 5-methylcytosine"
ttcccaatatacccaagcattgtttgcaggttaaaaataccatctggctaaatcctgctgcgttgggctggggatttgggcctggctgcctatgtgtgaaaatcattgctgaaaattcttca

SEQ ID NO: 28681 - DNA, 122 bp, Homo sapiens
  misc_feature (61)..(62): /note="This region represents a CpG dinucleotide"
  misc_feature (61)..(61): /note="Nucleotide may be methylated to form 5-methylcytosine"
ccacctctagctgagttgtctctgtccacacattatcacctacgcgataataaatgactgcgttggagagggtatcttgcagtgtcttgccacccagtgaatatatggcatctttcccgggc

SEQ ID NO: 28682 - DNA, 122 bp, Homo sapiens
  misc_feature (61)..(62): /note="This region represents a CpG dinucleotide"
  misc_feature (61)..(61): /note="Nucleotide may be methylated to form 5-methylcytosine"
ggtggggctggcccagagcttgaaaagttcacaggaggtgttcagagcaattgtgcctagcgcctgatctaatctgttgtcagagtgtgatctattgtcagagtgtgatctattgtcagagt

SEQ ID NO: 28683 - DNA, 122 bp, Homo sapiens
  misc_feature (61)..(62): /note="This region represents a CpG dinucleotide"
  misc_feature (61)..(61): /note="Nucleotide may be methylated to form 5-methylcytosine"
accttgtgattcacccgcctcggcctcccaaagtgctgggattacaggcatgagccaccgcgccgagatctttgtgtggatttctactgttgatttacctgcttcagctgcgactgttcatt

SEQ ID NO: 28684 - DNA, 122 bp, Homo sapiens
  misc_feature (61)..(62): /note="This region represents a CpG dinucleotide"
  misc_feature (61)..(61): /note="Nucleotide may be methylated to form 5-methylcytosine"
atcaaagttttaaaattactgaaaaactcccagtaggttgaacataagacatccccttggcgcggagaacaaagtctacgcttttcccccgggcctcaccgtagcggcccagctgccagctg

SEQ ID NO: 28685 - DNA, 122 bp, Homo sapiens
  misc_feature (61)..(62): /note="This region represents a CpG dinucleotide"
  misc_feature (61)..(61): /note="Nucleotide may be methylated to form 5-methylcytosine"
taaatttgacaaatgtattaaaaattcaaggctaaatgggttgaacaaaagattggaagccgaggtaatctgtgagagatccatgcccagctggctaagcttttcatccttcggttcttacc

SEQ ID NO: 28686 - DNA, 122 bp, Homo sapiens
  misc_feature (61)..(62): /note="This region represents a CpG dinucleotide"
  misc_feature (61)..(61): /note="Nucleotide may be methylated to form 5-methylcytosine"
tcctgacaggtcttggggacatcagccatctgggagtcggcaaaagctggcaagacttcccgtaaggggcagcgggcgcgcctctcctggggctggatcaatgaggaacccacgtcaatacc

SEQ ID NO: 28687 - DNA, 122 bp, Homo sapiens
  misc_feature (61)..(62): /note="This region represents a CpG dinucleotide"
  misc_feature (61)..(61): /note="Nucleotide may be methylated to form 5-methylcytosine"
ttcaagcatattcttaattatttaaaaaagaactgaaagtctacttcaggcaacacatcacgggaagtagctgtgactcagttcctgtctttatgagctaagtcacatggggacaagcaggg

SEQ ID NO: 28688 - DNA, 122 bp, Homo sapiens
  misc_feature (61)..(62): /note="This region represents a CpG dinucleotide"
  misc_feature (61)..(61): /note="Nucleotide may be methylated to form 5-methylcytosine"
gtgcagtggcctgtcagcacttgggaggagccacatgtgcatttgtttactgaagttgtgcgcatgctttcttgagacatttttcccttatcagtcaggtgttcctagaggaaggtcacata

SEQ ID NO: 28689 - DNA, 122 bp, Homo sapiens
  misc_feature (61)..(62): /note="This region represents a CpG dinucleotide"
  misc_feature (61)..(61): /note="Nucleotide may be methylated to form 5-methylcytosine"
gcccctcctttcttttcgctagttcctcattttgctagtgtacccaggttctaactactgcgtataaaggcagtgtcagagacggcccctgctttcttcccagctctagtttcaggcctgaa

SEQ ID NO: 28690 - DNA, 122 bp, Homo sapiens
  misc_feature (61)..(62): /note="This region represents a CpG dinucleotide"
  misc_feature (61)..(61): /note="Nucleotide may be methylated to form 5-methylcytosine"
cgagtgagagtgtttcccactgcaggcttgcctgtctgggtctgcaggctaggaacagggcgcctccttcctgggagcagggagatgtggaaatgtgggtgggaagctgcagggctgggtct

SEQ ID NO: 28691 - DNA, 122 bp, Homo sapiens
  misc_feature (61)..(62): /note="This region represents a CpG dinucleotide"
  misc_feature (61)..(61): /note="Nucleotide may be methylated to form 5-methylcytosine"
actcagacttgaagctcaggagtaacctgcctgagcaaagcaaagaactaaaggctcccacgttagtgtccctcagagtttaggacccagaactgaatcatgacctggtttctagtttcctt

SEQ ID NO: 28692 - DNA, 122 bp, Homo sapiens
  misc_feature (61)..(62): /note="This region represents a CpG dinucleotide"
  misc_feature (61)..(61): /note="Nucleotide may be methylated to form 5-methylcytosine"
ctgcctctgtgtggttccaacatggcagtttcagggctgctgcgcttcttacatgtggctcgtgctcaaacgcccgtgtctcaagggagcctagaacaagctttgtgaccttctctaggcta

SEQ ID NO: 28693 - DNA, 122 bp, Homo sapiens
  misc_feature (61)..(62): /note="This region represents a CpG dinucleotide"
  misc_feature (61)..(61): /note="Nucleotide may be methylated to form 5-methylcytosine"
atctcagactggccccacacaggttacttagctgtgtgtgaatctgccttccctgccagacggtgggctcctgcaagtagggctggtctgtgtgagtgactcaagcaattctgatgaaaggg

SEQ ID NO: 28694 - DNA, 122 bp, Homo sapiens
  misc_feature (61)..(62): /note="This region represents a CpG dinucleotide"
  misc_feature (61)..(61): /note="Nucleotide may be methylated to form 5-methylcytosine"
ctgaatacaccccttctgttaaaatgcagcctaggattacactagctttgttcacagccacgtaacaccactgactcacatgaagactgaagacaacacaaccccccacatcttgttcacaa

SEQ ID NO: 28695 - DNA, 122 bp, Homo sapiens
  misc_feature (61)..(62): /note="This region represents a CpG dinucleotide"
  misc_feature (61)..(61): /note="Nucleotide may be methylated to form 5-methylcytosine"
aatcattacatctcctctcctcgctacaaatgcaaggcatgaatcaggtatgcagaggcacgcactgccagatggaaatgagaaaggatgtccagagagatatatggaagaggtcaagaaca

SEQ ID NO: 28696 - DNA, 122 bp, Homo sapiens
  misc_feature (61)..(62): /note="This region represents a CpG dinucleotide"
  misc_feature (61)..(61): /note="Nucleotide may be methylated to form 5-methylcytosine"
aggatcctgtcccaattactctgtattgcacacaggacagcctcaaactggacagagaaacgagaattagtgacagtggaatgaggaaagctagcatgtctcatcagcacctcagtggtgga

SEQ ID NO: 28697 - DNA, 122 bp, Homo sapiens
  misc_feature (61)..(62): /note="This region represents a CpG dinucleotide"
  misc_feature (61)..(61): /note="Nucleotide may be methylated to form 5-methylcytosine"
tcagaggcgctcagtaactgggtgagaatgccgctgaggccgagaccttgctcagagcagcgtgactcgtgcccaaggcaggtcactccgtctggcctctcccttccgccaacactgcccag

SEQ ID NO: 28698 - DNA, 122 bp, Homo sapiens
  misc_feature (61)..(62): /note="This region represents a CpG dinucleotide"
  misc_feature (61)..(61): /note="Nucleotide may be methylated to form 5-methylcytosine"
ttcacctcttactgagtaaccataggcaagtcacgaacttctctaagcctcaaactgatacgtaaaaggaaggagggagggaaataatcaccaccttacaggcatgtggatactgtctgttt

SEQ ID NO: 28699 - DNA, 122 bp, Homo sapiens
  misc_feature (61)..(62): /note="This region represents a CpG dinucleotide"
  misc_feature (61)..(61): /note="Nucleotide may be methylated to form 5-methylcytosine"
tgcccgccgtcctctggggctcccacccgctcttcccaagctcccgttggccctcaccgtcgaagtcaatgcggccgtcgttgttcttgtcgccgtctttcatcagagattcgatctcctcg

SEQ ID NO: 28700 - DNA, 122 bp, Homo sapiens
  misc_feature (61)..(62): /note="This region represents a CpG dinucleotide"
  misc_feature (61)..(61): /note="Nucleotide may be methylated to form 5-methylcytosine"
ttctatcagatgccagatcaccctccttccatcacgtcacaagctgtaagacccgacttgcgtaagcaatctcctgggctttttgagggttaagtattatgtttattgcagcacctatgctt

SEQ ID NO: 28701 - DNA, 122 bp, Homo sapiens
  misc_feature (61)..(62): /note="This region represents a CpG dinucleotide"
  misc_feature (61)..(61): /note="Nucleotide may be methylated to form 5-methylcytosine"
taaggcagggcatgaacccaactccatgacagccaattagctccactccaagaacccaaccgctgtgactcactgacagccaatcaggaggcccagggccagatacttttttcagctagaca

SEQ ID NO: 28702 - DNA, 122 bp, Homo sapiens
  misc_feature (61)..(62): /note="This region represents a CpG dinucleotide"
  misc_feature (61)..(61): /note="Nucleotide may be methylated to form 5-methylcytosine"
aaaattcttattttgaagcaaactcaaagctaggtcctgatgtctcaaggcacaggtactcgtacttaaaggtgagtctgaaatctgtggatttggggaactttggaaaaacaaagatgagt

SEQ ID NO: 28703 - DNA, 122 bp, Homo sapiens
  misc_feature (61)..(62): /note="This region represents a CpG dinucleotide"
  misc_feature (61)..(61): /note="Nucleotide may be methylated to form 5-methylcytosine"
tcctctttctgccctgttgggctagacctagatatactttatagttatttgtagatgttccgtctcaagatcatgctatgatcttgaggggaagaggaaacagtcttactcacctttatctc

SEQ ID NO: 28704 - DNA, 122 bp, Homo sapiens
  misc_feature (61)..(62): /note="This region represents a CpG dinucleotide"
  misc_feature (61)..(61): /note="Nucleotide may be methylated to form 5-methylcytosine"
cctgagagaggggttcaggtacatgtgactgattgatgaaatactgtcaggaggcagtaacgtggaaattaggataaagtagggtaaagagttaaggaataatataatatgactcagcttgg

SEQ ID NO: 28705 - DNA, 122 bp, Homo sapiens
  misc_feature (61)..(62): /note="This region represents a CpG dinucleotide"
  misc_feature (61)..(61): /note="Nucleotide may be methylated to form 5-methylcytosine"
atgggcagccccaggcagctctggggtgtgggcggtcagcagtgctgacttattagtcagcgtaagtcagcgctgagagatgctacaccctctgacagggcatgcattcattaaacgaattc

SEQ ID NO: 28706 - DNA, 122 bp, Homo sapiens
  misc_feature (61)..(62): /note="This region represents a CpG dinucleotide"
  misc_feature (61)..(61): /note="Nucleotide may be methylated to form 5-methylcytosine"
agcagtcaggtagaatggcaggtcatgccctggcccttaaagtccgcttgggtgtgtgcacgttcttccgttcacatttcattggccaaagcaaatcacaaacccacccttaacttcgaaga

SEQ ID NO: 28707 - DNA, 122 bp, Homo sapiens
  misc_feature (61)..(62): /note="This region represents a CpG dinucleotide"
  misc_feature (61)..(61): /note="Nucleotide may be methylated to form 5-methylcytosine"
agcgagatgaccagtttctggcaggcctaatcactggcttaattctctctaagcacataacgtggtgtcttactgaatataatctatgggtcactttactgactgaggaagactcaacaaca

SEQ ID NO: 28708 - DNA, 122 bp, Homo sapiens
  misc_feature (61)..(62): /note="This region represents a CpG dinucleotide"
  misc_feature (61)..(61): /note="Nucleotide may be methylated to form 5-methylcytosine"
gacacacctggaaggtgctaagtgcaccgggcagaggaggcccctcctggccagcatgaccgtgcaccggcctgagtgggctcgggtgggaggcgccttcacagcactcagaccaggcttcc

SEQ ID NO: 28709 - DNA, 122 bp, Homo sapiens
  misc_feature (61)..(62): /note="This region represents a CpG dinucleotide"
  misc_feature (61)..(61): /note="Nucleotide may be methylated to form 5-methylcytosine"
aggaataggtttcaggatctattgtacagcagggtgactaccgtccacaacaatgcattacgtatttcgaaatcagaagagaaccaactttaaatgtctcatcataaacaatgaaaggtaag

SEQ ID NO: 28710 - DNA, 122 bp, Homo sapiens
  misc_feature (61)..(62): /note="This region represents a CpG dinucleotide"
  misc_feature (61)..(61): /note="Nucleotide may be methylated to form 5-methylcytosine"
ctgcagagtagctgggactataggactgtgctaccacacccagctcattttctaatttttcgtagagatgaggtttcactgtgttgcccaggctggtcttgaacttctggccttacgggatc

SEQ ID NO: 28711 - DNA, 122 bp, Homo sapiens
  misc_feature (61)..(62): /note="This region represents a CpG dinucleotide"
  misc_feature (61)..(61): /note="Nucleotide may be methylated to form 5-methylcytosine"
ccattccagggcatgggcaagtgtgcctggcttaggctgcgtgccagtgcctcagctgcacggcaggccaggaaagcggctcccaggccttgtgtctctcccagactctgggcaggcaattc

SEQ ID NO: 28712 - DNA, 122 bp, Homo sapiens
  misc_feature (61)..(62): /note="This region represents a CpG dinucleotide"
  misc_feature (61)..(61): /note="Nucleotide may be methylated to form 5-methylcytosine"
tcattaaaacctctgagctcctgggttggtgctcatcttctagcagtcaaaccagattgccgcttaggattctcaacttggatataaactaaatctcaagggtgttggttccaaacattgga

SEQ ID NO: 28713 - DNA, 122 bp, Homo sapiens
  misc_feature (61)..(62): /note="This region represents a CpG dinucleotide"
  misc_feature (61)..(61): /note="Nucleotide may be methylated to form 5-methylcytosine"
ccaaccatagtgtccttggggctggagaaagggaagcaagctcggatcacacttttgctacgtgaatcacctaaccacagataacagggtgacaggaagtcaatgatttgtatcatctcccc

SEQ ID NO: 28714 - DNA, 122 bp, Homo sapiens
  misc_feature (61)..(62): /note="This region represents a CpG dinucleotide"
  misc_feature (61)..(61): /note="Nucleotide may be methylated to form 5-methylcytosine"
ggtaatacctgtttgcttatccttctttgtccagctctgggatgttaccattccttcaggcgtgctgttttctccttaggcagtcttacacacactcatgacttccttccattgtcctccac

SEQ ID NO: 28715 - DNA, 122 bp, Homo sapiens
  misc_feature (61)..(62): /note="This region represents a CpG dinucleotide"
  misc_feature (61)..(61): /note="Nucleotide may be methylated to form 5-methylcytosine"
tttctagaaatgtgctgctgaccacattagcatatcccaaactaaatgtaaatgcacatacgctgagttacagtcttggaaactgaaatctgttttgagctatagaaaatgaaaaagtgatg

SEQ ID NO: 28716 - DNA, 122 bp, Homo sapiens
  misc_feature (61)..(62): /note="This region represents a CpG dinucleotide"
  misc_feature (61)..(61): /note="Nucleotide may be methylated to form 5-methylcytosine"
actctcctcattttgcagatgaggagcccaaggtgaaatggccactcagggagtgagtgccggcttcctcagggaagagcgcctggctgggactagacaccagtgctgggaggtgggggtga

SEQ ID NO: 28717 - DNA, 122 bp, Homo sapiens
  misc_feature (61)..(62): /note="This region represents a CpG dinucleotide"
  misc_feature (61)..(61): /note="Nucleotide may be methylated to form 5-methylcytosine"
tccagtgcattctgatctaatctcttctggccccaagaggggacttacccagataagaggcgctcttcagagaaagtgagagggtgccacagcagggctttcacccaccaataagctgatga

SEQ ID NO: 28718 - DNA, 122 bp, Homo sapiens
  misc_feature (61)..(62): /note="This region represents a CpG dinucleotide"
  misc_feature (61)..(61): /note="Nucleotide may be methylated to form 5-methylcytosine"
aagaagaagatggtggatccaggagtctcaaggccacggtgaaaggagcctgcggaaaggcggtgaggtggcttaaacagtggtggggagaggctagctggcagacttttaagaacaaggaa

SEQ ID NO: 28719 - DNA, 122 bp, Homo sapiens
  misc_feature (61)..(62): /note="This region represents a CpG dinucleotide"
  misc_feature (61)..(61): /note="Nucleotide may be methylated to form 5-methylcytosine"
cctcatggttgggttaaactggaatcctgtggaatgggctggttggtgttgcttgaattgcgttaaatgaggtaacaggaattgtgttaggcttctctgattgcacaattcaacacctctgc

SEQ ID NO: 28720 - DNA, 122 bp, Homo sapiens
  misc_feature (61)..(62): /note="This region represents a CpG dinucleotide"
  misc_feature (61)..(61): /note="Nucleotide may be methylated to form 5-methylcytosine"
atcagacttaggtcacagaattcaatggtttctgactattttatttaaactggaaatcggcgggatggcaaggaatactacttgcttctatagtgtgtgatccacattagtgatttgtggaa

SEQ ID NO: 28721 - DNA, 122 bp, Homo sapiens
  misc_feature (61)..(62): /note="This region represents a CpG dinucleotide"
  misc_feature (61)..(61): /note="Nucleotide may be methylated to form 5-methylcytosine"
tgctgtaagcacccctttccctcctccattctcttcaccctttcctccacattctcttgacggagagctggtcacaactggtcacatcaccgcagcaagggactgactaatgtcagccaggg

SEQ ID NO: 28722 - DNA, 122 bp, Homo sapiens
  misc_feature (61)..(62): /note="This region represents a CpG dinucleotide"
  misc_feature (61)..(61): /note="Nucleotide may be methylated to form 5-methylcytosine"
gggagtttgcttttggaatggacacaatgctgtacagcatgctgcatacgcatcttgagccgtgggcagagcgatgacagactcgtcagcttcgttgagttctagtggcatgttcaagtgtt

SEQ ID NO: 28723 - DNA, 122 bp, Homo sapiens
  misc_feature (61)..(62): /note="This region represents a CpG dinucleotide"
  misc_feature (61)..(61): /note="Nucleotide may be methylated to form 5-methylcytosine"
tcttcagacctctgtgggctctgtgtggcaggtctctgcttgcaaggaggggaggagcagcgcttcaggcagggctttggagtcacatgccaaggtccaacttccagcttaactgtgtgact

SEQ ID NO: 28724 - DNA, 122 bp, Homo sapiens
  misc_feature (61)..(62): /note="This region represents a CpG dinucleotide"
  misc_feature (61)..(61): /note="Nucleotide may be methylated to form 5-methylcytosine"
aaaagctttgcagccagattgcctggggaagttattaaatctctcactgccttggctctccgtctgcagagtgggaataatcatggtgctttccttgtagaggtgataggaagattaaatgt

SEQ ID NO: 28725 - DNA, 122 bp, Homo sapiens
  misc_feature (61)..(62): /note="This region represents a CpG dinucleotide"
  misc_feature (61)..(61): /note="Nucleotide may be methylated to form 5-methylcytosine"
ggtccaaacccaaaggccaaacttcttcctctgccccagatgttcaatgtgaggcaagcacgaggattctgcaaaattgagaagccaataggcatggataaattgagcaactgcctacctta

SEQ ID NO: 28726 - DNA, 122 bp, Homo sapiens
  misc_feature (61)..(62): /note="This region represents a CpG dinucleotide"
  misc_feature (61)..(61): /note="Nucleotide may be methylated to form 5-methylcytosine"
caggcccctggaggctggggagcagctccacatgttgagctgagtcgagttcagtgtggccgtaggcaggccctggagctctgggccagctgcacagccagagagagcccttgagggaggga

SEQ ID NO: 28727 - DNA, 122 bp, Homo sapiens
  misc_feature (61)..(62): /note="This region represents a CpG dinucleotide"
  misc_feature (61)..(61): /note="Nucleotide may be methylated to form 5-methylcytosine"
atgacagtctttaaaaagataaccttagattgtcagagcaagatttggtgatattcaatacgttgtgcttacattctgcttggcaatgagaccacttaaccatcccttcacaacttgtatag

SEQ ID NO: 28728 - DNA, 122 bp, Homo sapiens
  misc_feature (61)..(62): /note="This region represents a CpG dinucleotide"
  misc_feature (61)..(61): /note="Nucleotide may be methylated to form 5-methylcytosine"
ggtctgcagagtcccttagtacctggtgttcaggcttctgaggccagaatgcagataggacgtctgagattgttgactttctcaactgaggaattgggggaaggaagtgccttaataaagtg

SEQ ID NO: 28729 - DNA, 122 bp, Homo sapiens
  misc_feature (61)..(62): /note="This region represents a CpG dinucleotide"
  misc_feature (61)..(61): /note="Nucleotide may be methylated to form 5-methylcytosine"
ggaaagagaaaaaaaataacctgccatctcctgatgagttcttaatacccaaactaaaaacgattatggcagtagcctggaaataaatagcatggcaaagttaacttcatgaatcttttcag

SEQ ID NO: 28730 - DNA, 122 bp, Homo sapiens
  misc_feature (61)..(62): /note="This region represents a CpG dinucleotide"
  misc_feature (61)..(61): /note="Nucleotide may be methylated to form 5-methylcytosine"
gctggatgaaagagtgaagaacatgggcctatttccaactgtcacagaaaacacctgccccgcaggtgctggcagggccagaaaatcaactgtgactcctctgctgttgcacaaattcagca

SEQ ID NO: 28731 - DNA, 122 bp, Homo sapiens
  misc_feature (61)..(62): /note="This region represents a CpG dinucleotide"
  misc_feature (61)..(61): /note="Nucleotide may be methylated to form 5-methylcytosine"
cacaactcagcaaccagttgggctgcttccctctgacgcacttgcttctcatccggggagcggggagtctccgtcttcacaagtgggcaggcttcactgagcccagaggcccctggggcaga

SEQ ID NO: 28732 - DNA, 122 bp, Homo sapiens
  misc_feature (61)..(62): /note="This region represents a CpG dinucleotide"
  misc_feature (61)..(61): /note="Nucleotide may be methylated to form 5-methylcytosine"
ctcgggagtctgcagtgtcttgtatccctgggtatgtgactgtgccttgggtttatatgacgagtaagtgataatcacgagccagtgagaggacaggcaacttccttctacctaacgctctt

SEQ ID NO: 28733 - DNA, 122 bp, Homo sapiens
  misc_feature (61)..(62): /note="This region represents a CpG dinucleotide"
  misc_feature (61)..(61): /note="Nucleotide may be methylated to form 5-methylcytosine"
gaaacaaactgtcgtgctatggaacatgccctgtggcagaaaacagtgaacagcctctggcggctgagggcctcaggtctacagttgcaagaaacctaatcttgtaaatatccagtgagctt

SEQ ID NO: 28734 - DNA, 122 bp, Homo sapiens
  misc_feature (61)..(62): /note="This region represents a CpG dinucleotide"
  misc_feature (61)..(61): /note="Nucleotide may be methylated to form 5-methylcytosine"
gctgaggctccacacacagtgacccaaccgactgctgctaacaaaataaaggtttcatctcggctttctcccccattttggtctgtgtggtgccaaaggaaataaacttttatttttccagt

SEQ ID NO: 28735 - DNA, 122 bp, Homo sapiens
  misc_feature (61)..(62): /note="This region represents a CpG dinucleotide"
  misc_feature (61)..(61): /note="Nucleotide may be methylated to form 5-methylcytosine"
tactttctccatctgtgaaatttaaataccaattcctcagccgggctgcagggaggagggcgtgtgggagcactgggcctccagcccaggacccgacagggacagcctccttggcaggctgg

SEQ ID NO: 28736 - DNA, 122 bp, Homo sapiens
  misc_feature (61)..(62): /note="This region represents a CpG dinucleotide"
  misc_feature (61)..(61): /note="Nucleotide may be methylated to form 5-methylcytosine"
gaatcgcatcctgcattacgtaacagtgccatctctggtgcctggtccgtgcagggtattcgtcactggactggccagacatcaaaggaagtgtttcccttatcaacataataaaaagttcc

SEQ ID NO: 28737 - DNA, 122 bp, Homo sapiens
  misc_feature (61)..(62): /note="This region represents a CpG dinucleotide"
  misc_feature (61)..(61): /note="Nucleotide may be methylated to form 5-methylcytosine"
cctggaggcacagggctgtgaagtaacttcctaaactcactcagctgtggcaaaaccaagcgaggcccttgtagctggggttacactggagagtcacactcttccacggactgcctcaacta

SEQ ID NO: 28738 - DNA, 122 bp, Homo sapiens
  misc_feature (61)..(62): /note="This region represents a CpG dinucleotide"
  misc_feature (61)..(61): /note="Nucleotide may be methylated to form 5-methylcytosine"
gcaattcacttaaaaaaacactcacattactttctccacaattcatattggtcagaatctcgtaattattatgaaatgtttaatgggggaagtggctcttattctaaaggggatgtgttcaa

SEQ ID NO: 28739 - DNA, 122 bp, Homo sapiens
  misc_feature (61)..(62): /note="This region represents a CpG dinucleotide"
  misc_feature (61)..(61): /note="Nucleotide may be methylated to form 5-methylcytosine"
cttgaagtttgtgtttattattatcaaataaatggaagactataggtacccaaagaggcacgatggctggtagattcttcaacagaagtagctgttttaccgatcaagctgcaacactcttg

SEQ ID NO: 28740 - DNA, 122 bp, Homo sapiens
  misc_feature (61)..(62): /note="This region represents a CpG dinucleotide"
  misc_feature (61)..(61): /note="Nucleotide may be methylated to form 5-methylcytosine"
tggtgactccatattcacccatcagaggaactgctagactgtttagcaagcagctgcccacgttaccttcccaccagccacagatgtgggttccagttcctctacatcctcaccacttgtta

SEQ ID NO: 28741 - DNA, 122 bp, Homo sapiens
  misc_feature (61)..(62): /note="This region represents a CpG dinucleotide"
  misc_feature (61)..(61): /note="Nucleotide may be methylated to form 5-methylcytosine"
tgttctgcttcctaggcaccgaagattacctttcaaccccttgaagttaagtcagaaccacgtgactcattctgccaatgagttgtgagcagtactaatctctcccaagcaaccaaagttga

SEQ ID NO: 28742 - DNA, 122 bp, Homo sapiens
  misc_feature (61)..(62): /note="This region represents a CpG dinucleotide"
  misc_feature (61)..(61): /note="Nucleotide may be methylated to form 5-methylcytosine"
tgctggcactcaccaggaagcagagttcaccctggcggaagaggtttgagccctctccagcgcaggcagctgtgttcaggacctctggagaatgcagtcatttgtttacacagctaaatcaa

SEQ ID NO: 28743 - DNA, 122 bp, Homo sapiens
  misc_feature (61)..(62): /note="This region represents a CpG dinucleotide"
  misc_feature (61)..(61): /note="Nucleotide may be methylated to form 5-methylcytosine"
aaaaacattcttttgcttccggtaacactggtcctaaatgtatttgctccacaacatggtcgtctttgagaaagagagactatttgatttgctgaatgaaatggctgggatgctcattgcat

SEQ ID NO: 28744 - DNA, 122 bp, Homo sapiens
  misc_feature (61)..(62): /note="This region represents a CpG dinucleotide"
  misc_feature (61)..(61): /note="Nucleotide may be methylated to form 5-methylcytosine"
ccaagaatgggcagcgccagccatccgcccacctggagcaccatgagaactacaccggggcgtgtggatgccagcttggcaagctgtgaaagccttgcaggtgtttccatcagatcccacag

SEQ ID NO: 28745 - DNA, 122 bp, Homo sapiens
  misc_feature (61)..(62): /note="This region represents a CpG dinucleotide"
  misc_feature (61)..(61): /note="Nucleotide may be methylated to form 5-methylcytosine"
ctctaccccttgctgtggacaaatactttaatctgtgtcttaatttcttaatctgagaaacgaggactaaactagctatgtttgtgaggatttgagatgctatgtagaaatacctggcactg

SEQ ID NO: 28746 - DNA, 122 bp, Homo sapiens
  misc_feature (61)..(62): /note="This region represents a CpG dinucleotide"
  misc_feature (61)..(61): /note="Nucleotide may be methylated to form 5-methylcytosine"
tcagtaggggttttgatgctgcaaggccttggagggcattttcaaaggtctacccttgcccgcccctgctgttaggaacacaggaacagggaaagaatgtgccagttacttctggaacagat

SEQ ID NO: 28747 - DNA, 122 bp, Homo sapiens
  misc_feature (61)..(62): /note="This region represents a CpG dinucleotide"
  misc_feature (61)..(61): /note="Nucleotide may be methylated to form 5-methylcytosine"
cagaaatacttttaagataaagttgacagcatatgtcaactgcctgattgggactaagaacggtgaggagttactcagttattttgtcatgtggcactgttatcatggcttagctcactaaa

SEQ ID NO: 28748 - DNA, 122 bp, Homo sapiens
  misc_feature (61)..(62): /note="This region represents a CpG dinucleotide"
  misc_feature (61)..(61): /note="Nucleotide may be methylated to form 5-methylcytosine"
tgtagccaatgaggcaggatgaaaatcagaaagagcggtgtcccagaagccaaggggaaacgacattttgatagggaaggagttatctgttgcctgtgtcaaatgtggctgaagatccagtt

SEQ ID NO: 28749 - DNA, 122 bp, Homo sapiens
  misc_feature (61)..(62): /note="This region represents a CpG dinucleotide"
  misc_feature (61)..(61): /note="Nucleotide may be methylated to form 5-methylcytosine"
tttctacatcaaggacttgatctctcaaaagcttttgattttactaaacatacgataccccgccgccccacctatactgcaaacacacacaaaaaacactttgctggtctgaagaagttttc

SEQ ID NO: 28750 - DNA, 122 bp, Homo sapiens
  misc_feature (61)..(62): /note="This region represents a CpG dinucleotide"
  misc_feature (61)..(61): /note="Nucleotide may be methylated to form 5-methylcytosine"
gccagtttcctgtaaatgttgcatgtgacattatacttcctcactgcaccttctttgactcgcctccctaaccggtcagaggcatgtgataagatcaatttgctgcttgcttcacatggggg

SEQ ID NO: 28751 - DNA, 122 bp, Homo sapiens
  misc_feature (61)..(62): /note="This region represents a CpG dinucleotide"
  misc_feature (61)..(61): /note="Nucleotide may be methylated to form 5-methylcytosine"
gggaagatgtaatcttactggattttataccctgggggaactcggattactgagctgaagcgttgcaggaccccaaggaaacagatcactgagctaaagtgttgcaagacatcctgtcctag

SEQ ID NO: 28752 - DNA, 122 bp, Homo sapiens
  misc_feature (61)..(62): /note="This region represents a CpG dinucleotide"
  misc_feature (61)..(61): /note="Nucleotide may be methylated to form 5-methylcytosine"
gagggaatggacgaatgaacaaatggaatgatctctcacataccttccaactcaagatctcgtaaaattccaagtcctgctggtcctggaaatccgatgccaattgctgcctgccctgtttc

SEQ ID NO: 28753 - DNA, 122 bp, Homo sapiens
  misc_feature (61)..(62): /note="This region represents a CpG dinucleotide"
  misc_feature (61)..(61): /note="Nucleotide may be methylated to form 5-methylcytosine"
gaaaatcaagaaagccagactctttagtaacccttgcttgtgagaactaatccattcccacgacagcaagaatgagaactcactcaccccagtaggagggcattagtttattcatgtgggat

SEQ ID NO: 28754 - DNA, 122 bp, Homo sapiens
  misc_feature (61)..(62): /note="This region represents a CpG dinucleotide"
  misc_feature (61)..(61): /note="Nucleotide may be methylated to form 5-methylcytosine"
aattatttcttctgatgacagttgttcttttctttcttccttttcctgctttatgctgctcgttttcctctacggtcttggggtcttcagtagactgatttcctattgaaaatcaactaggc

SEQ ID NO: 28755 - DNA, 122 bp, Homo sapiens
  misc_feature (61)..(62): /note="This region represents a CpG dinucleotide"
  misc_feature (61)..(61): /note="Nucleotide may be methylated to form 5-methylcytosine"
tggggaagtctgcattcctcccagtcttgaacaattactgacaagtgctttatttgtctgcgctcattagggtcaatctgattcgtctagggatatgagaagtgctatttgagatgcctttg

SEQ ID NO: 28756 - DNA, 122 bp, Homo sapiens
  misc_feature (61)..(62): /note="This region represents a CpG dinucleotide"
  misc_feature (61)..(61): /note="Nucleotide may be methylated to form 5-methylcytosine"
gaggtagcatgagcttcttaatagggtcactgtctctacaaagggacatcaggagcattccgtgtcatgagtattcgggaatctaaacataggggtgataatcctttttaacaacaccatgt

SEQ ID NO: 28757 - DNA, 122 bp, Homo sapiens
  misc_feature (61)..(62): /note="This region represents a CpG dinucleotide"
  misc_feature (61)..(61): /note="Nucleotide may be methylated to form 5-methylcytosine"
aggacgccggcccaggtctatctgagcttggtccccatgagatgccttctgagttccaatcgcagcccccaagcctcagaactgctggatcaaaactgcaggcaaggaaggatgggtgcaaa

SEQ ID NO: 28758 - DNA, 122 bp, Homo sapiens
  misc_feature (61)..(62): /note="This region represents a CpG dinucleotide"
  misc_feature (61)..(61): /note="Nucleotide may be methylated to form 5-methylcytosine"
caggctccaggagcttcggcaggaaacagctgcccctgccccttggatcatccatacctgcgtggctgaagctgtaactctggtcatgtggcctctggcaaagatgctatgagccatggtgt

SEQ ID NO: 28759 - DNA, 122 bp, Homo sapiens
  misc_feature (61)..(62): /note="This region represents a CpG dinucleotide"
  misc_feature (61)..(61): /note="Nucleotide may be methylated to form 5-methylcytosine"
ggcacgagaactgctgaccacttcctgcaggcctccgacccggcggcccagccacccatccggctggggtggccatcagtcatctggaaagcctatgagccccgtgtcctcgttttgcaaag

SEQ ID NO: 28760 - DNA, 122 bp, Homo sapiens
  misc_feature (61)..(62): /note="This region represents a CpG dinucleotide"
  misc_feature (61)..(61): /note="Nucleotide may be methylated to form 5-methylcytosine"
gcctaggcttgtcttgtgtaatacagttcagtattacccaggccctggaaccgaaatctgcgtatgaacagctctcttaggacatattcaaatattttcatcctctttgctgagaatttaag

SEQ ID NO: 28761 - DNA, 122 bp, Homo sapiens
  misc_feature (61)..(62): /note="This region represents a CpG dinucleotide"
  misc_feature (61)..(61): /note="Nucleotide may be methylated to form 5-methylcytosine"
tatacttgtcaaccctaaaccaagccataattggagcagctactgttatcaaagtggggccgctctgtgacagcttaataaagctgaaactgttaaattaaatctcagatgcttaactcctt

SEQ ID NO: 28762 - DNA, 122 bp, Homo sapiens
  misc_feature (61)..(62): /note="This region represents a CpG dinucleotide"
  misc_feature (61)..(61): /note="Nucleotide may be methylated to form 5-methylcytosine"
gaccaaggccatgcacacatgcataggcattgacaactatgaaaaggctgctgcttggggcgtggtggctcatgcctgtaatcccagcactatgggaggccgaggcaggcatatcacctgag

SEQ ID NO: 28763 - DNA, 122 bp, Homo sapiens
  misc_feature (61)..(62): /note="This region represents a CpG dinucleotide"
  misc_feature (61)..(61): /note="Nucleotide may be methylated to form 5-methylcytosine"
tgctttgatttggccttggtgaccaggacaacacactctgagggtgccacagtcaatattcgcttcactgagcttcttatcaggctccaacctatggggagcaaagggcagagcttggcaag

SEQ ID NO: 28764 - DNA, 122 bp, Homo sapiens
  misc_feature (61)..(62): /note="This region represents a CpG dinucleotide"
  misc_feature (61)..(61): /note="Nucleotide may be methylated to form 5-methylcytosine"
aaaacacccatattttcatctaggctgtgtcagattttcccactgacttaattttattcccgcaacaactttatgaagttgagaaaaaacactgcatgatttttgcattcacttttggttcc

SEQ ID NO: 28765 - DNA, 122 bp, Homo sapiens
  misc_feature (61)..(62): /note="This region represents a CpG dinucleotide"
  misc_feature (61)..(61): /note="Nucleotide may be methylated to form 5-methylcytosine"
aacactgtttagatacctgactgcattttctcaagtaaccatctggctccagtgggttttcgttattaacagcagttacgttctgtgaagtcaccgtgaacactgaacccttgctcctgaag

SEQ ID NO: 28766 - DNA, 122 bp, Homo sapiens
  misc_feature (61)..(62): /note="This region represents a CpG dinucleotide"
  misc_feature (61)..(61): /note="Nucleotide may be methylated to form 5-methylcytosine"
ttccccgttttcaggcatgcagcatgcaggccccactcctgccgctggacttacagtgaacggagccaggaaagcgaatctgccttgacttgtcctggattctgcaggaaggccccacctga

SEQ ID NO: 28767 - DNA, 122 bp, Homo sapiens
  misc_feature (61)..(62): /note="This region represents a CpG dinucleotide"
  misc_feature (61)..(61): /note="Nucleotide may be methylated to form 5-methylcytosine"
gcgtttccagggttgtgagttaaaaaggtaaacaatgcaagtcaattggcagatggccaacggtcctgtctgacctcacagcacaagattttcagaactgcatgcccttgaccgatagaaac

SEQ ID NO: 28768 - DNA, 122 bp, Homo sapiens
  misc_feature (61)..(62): /note="This region represents a CpG dinucleotide"
  misc_feature (61)..(61): /note="Nucleotide may be methylated to form 5-methylcytosine"
ctggccttgtgtaccggaaactctcttggctggatccagcccttcctcctgatgtgctgtcgggcttgtccctggtgccctcttctctgattgttccagtctgcctgcgggcacttagcata

SEQ ID NO: 28769 - DNA, 122 bp, Homo sapiens
  misc_feature (61)..(62): /note="This region represents a CpG dinucleotide"
  misc_feature (61)..(61): /note="Nucleotide may be methylated to form 5-methylcytosine"
tactcaaactgcagccacagccgcttaaagagaagtttgacgcaagccttattcagcagacgctttctaattcagaatgttccgaggcagttgatcttgctacttctaaactagtgaagggg

SEQ ID NO: 28770 - DNA, 122 bp, Homo sapiens
  misc_feature (61)..(62): /note="This region represents a CpG dinucleotide"
  misc_feature (61)..(61): /note="Nucleotide may be methylated to form 5-methylcytosine"
atgcaaaactgccaattcaattgcacaatgagaaaaaatatatttggaacaattcacaagcgatgtttaccatacctgctaaaaggaaaaaactcaccagaaagaatttactgaagaggatt

SEQ ID NO: 28771 - DNA, 122 bp, Homo sapiens
  misc_feature (61)..(62): /note="This region represents a CpG dinucleotide"
  misc_feature (61)..(61): /note="Nucleotide may be methylated to form 5-methylcytosine"
gttctcagtgaagagtcatccattgagtgagcaatgagcttgatgggactctcctggatccgctctgtgccactacactgagtcatataccggagacactgtgactacaagttctgttacag

SEQ ID NO: 28772 - DNA, 122 bp, Homo sapiens
  misc_feature (61)..(62): /note="This region represents a CpG dinucleotide"
  misc_feature (61)..(61): /note="Nucleotide may be methylated to form 5-methylcytosine"
gtgggatgaattaaaaatgtgcttgcatcagctaaaggacatatgcacctttctctctttcgtgacatgtttgtgctggagtgaaaatatattgcaggatatttctactggaaggtaaagta

SEQ ID NO: 28773 - DNA, 122 bp, Homo sapiens
  misc_feature (61)..(62): /note="This region represents a CpG dinucleotide"
  misc_feature (61)..(61): /note="Nucleotide may be methylated to form 5-methylcytosine"
caaccaccctctatgaaataacattctccattcctgtctttcactagacctcatttgttgcgttatttttcatcatagcattaatcagctcttggcctacaaagaatagtatgtttatttat

SEQ ID NO: 28774 - DNA, 122 bp, Homo sapiens
  misc_feature (61)..(62): /note="This region represents a CpG dinucleotide"
  misc_feature (61)..(61): /note="Nucleotide may be methylated to form 5-methylcytosine"
agaggcagagccgcacagcagggagaggctgtggctctggagctgagcctcctgggtttacgtcccaccctgctgctgttggcttgatgacctgggcgaatcatctacctctctgggcttca

SEQ ID NO: 28775 - DNA, 122 bp, Homo sapiens
  misc_feature (61)..(62): /note="This region represents a CpG dinucleotide"
  misc_feature (61)..(61): /note="Nucleotide may be methylated to form 5-methylcytosine"
aggaagtagaaaatatgagtaatttggggacgcagaatctttcgtcacttccctccatcgcgtctcatgtccaggatcttcccaggagtcgtaggaaatgtagcatccatgcagttagtcgt

SEQ ID NO: 28776 - DNA, 122 bp, Homo sapiens
  misc_feature (61)..(62): /note="This region represents a CpG dinucleotide"
  misc_feature (61)..(61): /note="Nucleotide may be methylated to form 5-methylcytosine"
ttccccagtctatttcacatccgcttttatatcaaggcagatgacaaggaaacaaactgacgtcagtttattaaaggaaacacttgtgatattgggagtaatccctcaggcaagaggtgcta

SEQ ID NO: 28777 - DNA, 122 bp, Homo sapiens
  misc_feature (61)..(62): /note="This region represents a CpG dinucleotide"
  misc_feature (61)..(61): /note="Nucleotide may be methylated to form 5-methylcytosine"
tctgatgatgtggccaggatgtcagctgcaaaatgaaccccaggtcattcagtgaggctgcgtctacctgtaactttgccatgtcctaaaaaggtcttgaagggcagacagatggttgatag

SEQ ID NO: 28778 - DNA, 122 bp, Homo sapiens
  misc_feature (61)..(62): /note="This region represents a CpG dinucleotide"
  misc_feature (61)..(61): /note="Nucleotide may be methylated to form 5-methylcytosine"
gttacaggcataaccaaacagctctttagcttgtccctgaatctcctgccaaaatcatatcgcatctaaatcataccttgcgcttccaaaaggtctacagaagaaagatactctattttatg

SEQ ID NO: 28779 - DNA, 122 bp, Homo sapiens
  misc_feature (61)..(62): /note="This region represents a CpG dinucleotide"
  misc_feature (61)..(61): /note="Nucleotide may be methylated to form 5-methylcytosine"
acagtgaacctaaatgaataaataaacaggaagaatgggaccatgaccaaatgttgcaaccggatccaaagtttgatgccttggcatcacttgtttggtcatttgaaatgcaaattcctagg

SEQ ID NO: 28780 - DNA, 122 bp, Homo sapiens
  misc_feature (61)..(62): /note="This region represents a CpG dinucleotide"
  misc_feature (61)..(61): /note="Nucleotide may be methylated to form 5-methylcytosine"
cctgtcaagtcaggacacatctcatttgaagaaagcaagggttttacaggaaaacgccaacgcagcctttcatgggcataaacaagggccactgtgctctggcatacctgtggaccggcgac

SEQ ID NO: 28781 - DNA, 122 bp, Homo sapiens
  misc_feature (61)..(62): /note="This region represents a CpG dinucleotide"
  misc_feature (61)..(61): /note="Nucleotide may be methylated to form 5-methylcytosine"
tcaggcatggtgccaactgtaaaggaggagcagagctgcttccgactaaggctgaagacacgtaaagcacacagacttaacaacagtggtgacaagatgtccagacaggcagtttgatcaca

SEQ ID NO: 28782 - DNA, 122 bp, Homo sapiens
  misc_feature (61)..(62): /note="This region represents a CpG dinucleotide"
  misc_feature (61)..(61): /note="Nucleotide may be methylated to form 5-methylcytosine"
tctgactggagctcatgcaccagcattacagggtttagtaggttagacaaggtcctttggcggagtgaagagaaatagccagggaagctggcaatgactcagggaatcaccagcatggtgat

SEQ ID NO: 28783 - DNA, 122 bp, Homo sapiens
  misc_feature (61)..(62): /note="This region represents a CpG dinucleotide"
  misc_feature (61)..(61): /note="Nucleotide may be methylated to form 5-methylcytosine"
gaagaagtgaatgccggatagttttgttttgctcatttcagcacaggaacaggatacaaacggccagagctcaactggaacttgcagtggaatggcacatccataaatcactgggctggttc

SEQ ID NO: 28784 - DNA, 122 bp, Homo sapiens
  misc_feature (61)..(62): /note="This region represents a CpG dinucleotide"
  misc_feature (61)..(61): /note="Nucleotide may be methylated to form 5-methylcytosine"
ttgtgaccttttctccacttgagtcctcctaagaaaagcacaagagggccacaatttgatcgtcttggcctggattcagctgcaggagtgttcttatgcattctgacctcagcatgttggct

SEQ ID NO: 28785 - DNA, 122 bp, Homo sapiens
  misc_feature (61)..(62): /note="This region represents a CpG dinucleotide"
  misc_feature (61)..(61): /note="Nucleotide may be methylated to form 5-methylcytosine"
aatgtgttaacatgttgtgagtctgatacagcatatttagatgttggaattagactacatcgtgaaatttctagaaggccggcaaaaaccgtatgtctatctatgaggtaaacatacactga

SEQ ID NO: 28786 - DNA, 122 bp, Homo sapiens
  misc_feature (61)..(62): /note="This region represents a CpG dinucleotide"
  misc_feature (61)..(61): /note="Nucleotide may be methylated to form 5-methylcytosine"
cattaaggaaataacaaatgatctcaccttttgaacacatgtgacaggtaccaagtatcgcgttaggtattaagaatataaaagtaagtaaaatactgtcgtttccttaagaagttcataat

SEQ ID NO: 28787 - DNA, 122 bp, Homo sapiens
  misc_feature (61)..(62): /note="This region represents a CpG dinucleotide"
  misc_feature (61)..(61): /note="Nucleotide may be methylated to form 5-methylcytosine"
caggatgatgcatccacaggggagcgttctctgaacagggagaaattggctgttttgaaacgagccctgaatgtagttggcttcagcagcttggtgagtcatgtcataaatatttcactgag

SEQ ID NO: 28788 - DNA, 122 bp, Homo sapiens
  misc_feature (61)..(62): /note="This region represents a CpG dinucleotide"
  misc_feature (61)..(61): /note="Nucleotide may be methylated to form 5-methylcytosine"
ttaggatcaccaggctgactcactgtcatacagattccaactacaaaaatcatctgggagcgccctccgaagtgctaggattctgctggctgttttatgaacagctcatactatgaagtgga

SEQ ID NO: 28789 - DNA, 122 bp, Homo sapiens
  misc_feature (61)..(62): /note="This region represents a CpG dinucleotide"
  misc_feature (61)..(61): /note="Nucleotide may be methylated to form 5-methylcytosine"
cccctcctctttctttctctctttctctcttttgttctttctttctcaatagggctgttgcgcaggctggagtgcagtgtggcacaatcagctcactgcagccttgaactcccaggctcaag

SEQ ID NO: 28790 - DNA, 122 bp, Homo sapiens
  misc_feature (61)..(62): /note="This region represents a CpG dinucleotide"
  misc_feature (61)..(61): /note="Nucleotide may be methylated to form 5-methylcytosine"
agacggcaggaccacccgtctgcacaggcggagcttctgcacgccggacaagatggggcgcggactcctctccgtgtggacagatgacgaggagccccctccctgggctcagtggcagcgaa

SEQ ID NO: 28791 - DNA, 122 bp, Homo sapiens
  misc_feature (61)..(62): /note="This region represents a CpG dinucleotide"
  misc_feature (61)..(61): /note="Nucleotide may be methylated to form 5-methylcytosine"
ttccacccatgccattgttggggaacaggtgtgaggaggcacctagtccaaggcagggcccggccactgagtaattgcttctctgagcctcaccttcttaggtaaagacagggtgcacgggc

SEQ ID NO: 28792 - DNA, 122 bp, Homo sapiens
  misc_feature (61)..(62): /note="This region represents a CpG dinucleotide"
  misc_feature (61)..(61): /note="Nucleotide may be methylated to form 5-methylcytosine"
ccaggctcatccatactatagcatgaatgaacactcatccatttttatggcttagggctgcgtggtgttccattgtgtggacataccaccttttgtttgttcatttatcagttgatgaacat

SEQ ID NO: 28793 - DNA, 122 bp, Homo sapiens
  misc_feature (61)..(62): /note="This region represents a CpG dinucleotide"
  misc_feature (61)..(61): /note="Nucleotide may be methylated to form 5-methylcytosine"
tgcccataaactaacagaaagccaaatgtgttagaaataaaaccacaccagatttttcagcggcaggaccatttaaaatgatgcattaaggggaaatgctggctttttaaaaaaccacattc

SEQ ID NO: 28794 - DNA, 122 bp, Homo sapiens
  misc_feature (61)..(62): /note="This region represents a CpG dinucleotide"
  misc_feature (61)..(61): /note="Nucleotide may be methylated to form 5-methylcytosine"
tggactcctgccaggggagctgaaactctttgcttgagaggagctgatggtaagaggagccggatccctcatccactgcccacccgcaggatgaagtccaggcatgcaaaccccttcttagt

SEQ ID NO: 28795 - DNA, 122 bp, Homo sapiens
  misc_feature (61)..(62): /note="This region represents a CpG dinucleotide"
  misc_feature (61)..(61): /note="Nucleotide may be methylated to form 5-methylcytosine"
caaaaaactgtcacttacatttcagtacatacccctctggtcttttgttgtacatatacacgtatatttaaaatccttttcttgtgaactttatgttggtgcgggggaggtgtataattgca

SEQ ID NO: 28796 - DNA, 122 bp, Homo sapiens
  misc_feature (61)..(62): /note="This region represents a CpG dinucleotide"
  misc_feature (61)..(61): /note="Nucleotide may be methylated to form 5-methylcytosine"
ccagtatcttgcccacattctcctacttattactcttcaattccatttcagagtctgttacgtgaacataattacccttatccctcttgcacaaatctttctttaatctgttggatgactct

SEQ ID NO: 28797 - DNA, 122 bp, Homo sapiens
  misc_feature (61)..(62): /note="This region represents a CpG dinucleotide"
  misc_feature (61)..(61): /note="Nucleotide may be methylated to form 5-methylcytosine"
gtgaagccaggccccggctgactcacttctgaccatgaggtgtgccctgccctggtcagccggcctcacaggctcacctgtgtcagcctcctgtgatgctccctgactcgcgggaggagaag

SEQ ID NO: 28798 - DNA, 122 bp, Homo sapiens
  misc_feature (61)..(62): /note="This region represents a CpG dinucleotide"
  misc_feature (61)..(61): /note="Nucleotide may be methylated to form 5-methylcytosine"
tgcaggtgtggccagttgatcccctgtggagacagtaaagattaagaggatcataaactgcgtccagcggctgccccgggagaaatctcctcaagccagagcctgtgctgtgaggggcttcg

SEQ ID NO: 28799 - DNA, 122 bp, Homo sapiens
  misc_feature (61)..(62): /note="This region represents a CpG dinucleotide"
  misc_feature (61)..(61): /note="Nucleotide may be methylated to form 5-methylcytosine"
ccttctaatagcctccttttacaaaaggagtggaagtttggaactcctgccccagccctgcgccatgctttactttaagcaagacctagctctggttgccacatgcatggttgccacacttt

SEQ ID NO: 28800 - DNA, 122 bp, Homo sapiens
  misc_feature (61)..(62): /note="This region represents a CpG dinucleotide"
  misc_feature (61)..(61): /note="Nucleotide may be methylated to form 5-methylcytosine"
ctcatttaatcctcccagaaaacctgcagggtcagaatcattactccattttacggatgccggatgtcttctcagctaatcctcccatccaatcctctgggaagcctttcaggatgccccac

SEQ ID NO: 28801 - DNA, 122 bp, Homo sapiens
  misc_feature (61)..(62): /note="This region represents a CpG dinucleotide"
  misc_feature (61)..(61): /note="Nucleotide may be methylated to form 5-methylcytosine"
ccagatgtcattcgtgctgaaagaaccagaacaactctctgctccctgccaagcatgaagcggttgtgaccccaggaaaccacagtgactttgactctggttcagctgacatgctcgagtct

SEQ ID NO: 28802 - DNA, 122 bp, Homo sapiens
  misc_feature (61)..(62): /note="This region represents a CpG dinucleotide"
  misc_feature (61)..(61): /note="Nucleotide may be methylated to form 5-methylcytosine"
cggtgattggcttggtcttgcagggagcggctgccagcaggccggctggaggcggctttgcgctgccccagcctgggagccctcaggatgtgtgtggggtggagcctgctagggatcccagt

SEQ ID NO: 28803 - DNA, 122 bp, Homo sapiens
  misc_feature (61)..(62): /note="This region represents a CpG dinucleotide"
  misc_feature (61)..(61): /note="Nucleotide may be methylated to form 5-methylcytosine"
aatgataatttccttattcagtttcagaagaaaaagaatgaaattgggtaactgtcattgcgttagctttatgttgaattgggaaattgtggcataaagcttaaattcgtgtttatcaaatg

SEQ ID NO: 28804 - DNA, 122 bp, Homo sapiens
  misc_feature (61)..(62): /note="This region represents a CpG dinucleotide"
  misc_feature (61)..(61): /note="Nucleotide may be methylated to form 5-methylcytosine"
gtggttactgacaccaaattctgcaggggaagcctggtcagagacagacaggcctaggcccgaggaggggaagacctacagggaaggtggttccttccattcaaagggtgagaggaagtagt

SEQ ID NO: 28805 - DNA, 122 bp, Homo sapiens
  misc_feature (61)..(62): /note="This region represents a CpG dinucleotide"
  misc_feature (61)..(61): /note="Nucleotide may be methylated to form 5-methylcytosine"
cagctggtgtgtgggtgcaggggacgtggggatgcagcccaactctgcctcctggaattgcgtggccttgggccagcctcgcctcttagagtctcatgtataaaatgggaatgtcacccacc

SEQ ID NO: 28806 - DNA, 122 bp, Homo sapiens
  misc_feature (61)..(62): /note="This region represents a CpG dinucleotide"
  misc_feature (61)..(61): /note="Nucleotide may be methylated to form 5-methylcytosine"
agatacaggaggataattattttcaagttttgacacataacctgttattaactaaacaaacgtcaagagtattttggctagaacatcatgcagtcaaggtaaaaagtagatgttgatttgga

SEQ ID NO: 28807 - DNA, 122 bp, Homo sapiens
  misc_feature (61)..(62): /note="This region represents a CpG dinucleotide"
  misc_feature (61)..(61): /note="Nucleotide may be methylated to form 5-methylcytosine"
ccaggaccttcatcatccttagtgtctttcagtgttcatgattcatttagatgatgcagccgccatcccagttccttgacttcctcttctcatagggcagccttggaagtgtgtctatacat

SEQ ID NO: 28808 - DNA, 122 bp, Homo sapiens
  misc_feature (61)..(62): /note="This region represents a CpG dinucleotide"
  misc_feature (61)..(61): /note="Nucleotide may be methylated to form 5-methylcytosine"
aggaggtgatggctgtcggtgacgtcatagagacgggctctgaagggcgtgtccctgctccgttccgagggggcgcgactgtgtcttgcttgacctcgtgagggggcggagcctcaggggcg

SEQ ID NO: 28809 - DNA, 122 bp, Homo sapiens
  misc_feature (61)..(62): /note="This region represents a CpG dinucleotide"
  misc_feature (61)..(61): /note="Nucleotide may be methylated to form 5-methylcytosine"
cagagataacccatccccgctcagcctggtctggattcccaatgcacagaaacacatagacgaataacataattgtggagcaacaagattttggggcagttagttatgtaatcgtagataac

SEQ ID NO: 28810 - DNA, 122 bp, Homo sapiens
  misc_feature (61)..(62): /note="This region represents a CpG dinucleotide"
  misc_feature (61)..(61): /note="Nucleotide may be methylated to form 5-methylcytosine"
aatatgatggccagaaggcaggttgccagtaggaacatgagaagcatctggcttagtcgacggctcatgtgattcagtgcccaaggtgcaacacaattggccaggagggtgactgcaccaaa

SEQ ID NO: 28811 - DNA, 122 bp, Homo sapiens
  misc_feature (61)..(62): /note="This region represents a CpG dinucleotide"
  misc_feature (61)..(61): /note="Nucleotide may be methylated to form 5-methylcytosine"
attttggctgcacagtggaaccacctgggctgtttgaaaaaacctaggcctagccaggcacggtggctcatgcctgtaatcccagcacttagggagaccagcctggccaacatggtgaaacc

SEQ ID NO: 28812 - DNA, 122 bp, Homo sapiens
  misc_feature (61)..(62): /note="This region represents a CpG dinucleotide"
  misc_feature (61)..(61): /note="Nucleotide may be methylated to form 5-methylcytosine"
aaaccaatgctctcgccctttctttaaagtggggaccatggaccagcaacatcagcaacacgtggaggcttattagaaaggtagaatctcaggctccacctgctgagtcagaatctgtattt

SEQ ID NO: 28813 - DNA, 122 bp, Homo sapiens
  misc_feature (61)..(62): /note="This region represents a CpG dinucleotide"
  misc_feature (61)..(61): /note="Nucleotide may be methylated to form 5-methylcytosine"
aggatgattgctcatcaacctggtcgtaccctgacttccagggtccttgggtgcaacatccggagctagtccagagtaccgccaatggccttgtcacacatacacagcaaatgtgcaaagac

SEQ ID NO: 28814 - DNA, 122 bp, Homo sapiens
  misc_feature (61)..(62): /note="This region represents a CpG dinucleotide"
  misc_feature (61)..(61): /note="Nucleotide may be methylated to form 5-methylcytosine"
gccagcctcttagtgtcatggatctcctgccctcctcagaatattcaaaagaacattacacggccaggcgctgtggctcatgcctgtaatcccagcactttgggaggccgaggcgggtggat

SEQ ID NO: 28815 - DNA, 122 bp, Homo sapiens
  misc_feature (61)..(62): /note="This region represents a CpG dinucleotide"
  misc_feature (61)..(61): /note="Nucleotide may be methylated to form 5-methylcytosine"
agccaaccggggaggtgcctatgatctttctttccaagtttgagggttcaggtctgtgttcgcctgctggttagaccgatttaagttttagagtcccaggagttctgggcgagctgcagcct

SEQ ID NO: 28816 - DNA, 122 bp, Homo sapiens
  misc_feature (61)..(62): /note="This region represents a CpG dinucleotide"
  misc_feature (61)..(61): /note="Nucleotide may be methylated to form 5-methylcytosine"
tatggattaaaactgatgccctcaagttcagatgctttcagaccaagtattaaaacatagcgctctgcttcctcccaagaggaggcgctgactcttcccccagggcacaaacagtattattt

SEQ ID NO: 28817 - DNA, 122 bp, Homo sapiens
  misc_feature (61)..(62): /note="This region represents a CpG dinucleotide"
  misc_feature (61)..(61): /note="Nucleotide may be methylated to form 5-methylcytosine"
gatgtcacttccgctacgagcttcgggaaggacggggcttctgggatccagtttcagccacgtaggaccaggttgttagaaatgcttgttccccggtgcataaagaaatagcacttgaacat

SEQ ID NO: 28818 - DNA, 122 bp, Homo sapiens
  misc_feature (61)..(62): /note="This region represents a CpG dinucleotide"
  misc_feature (61)..(61): /note="Nucleotide may be methylated to form 5-methylcytosine"
aggacaagaaaaagctgaacaaatgcagggtggttgtggggtgtttgtgagggaagggagcggatgctgagagagctcaggaagtgccataggaccactcaccacaccctgttgtcttgaat

SEQ ID NO: 28819 - DNA, 122 bp, Homo sapiens
  misc_feature (61)..(62): /note="This region represents a CpG dinucleotide"
  misc_feature (61)..(61): /note="Nucleotide may be methylated to form 5-methylcytosine"
tgtgtttgcagattttggagcaaacttcccctttgggggacccacacccagggagaaagacggatgaagcccaactgttcagaaaccacagccttctcaggaaggatctttcagaagccatc

SEQ ID NO: 28820 - DNA, 122 bp, Homo sapiens
  misc_feature (61)..(62): /note="This region represents a CpG dinucleotide"
  misc_feature (61)..(61): /note="Nucleotide may be methylated to form 5-methylcytosine"
ccacagtggtagtaaagagagggcaggttcacagttagcatatttcacagtgtgagccagcgagcacatagcttcccatactgctgcttgaaggaggcaaaccaaaactctacattgcaaga

SEQ ID NO: 28821 - DNA, 122 bp, Homo sapiens
  misc_feature (61)..(62): /note="This region represents a CpG dinucleotide"
  misc_feature (61)..(61): /note="Nucleotide may be methylated to form 5-methylcytosine"
gcacattctcccattgaaatatttttgttagtggagacaagggaggtaatggcaaggacacggatcatcacagcccctagggatttgttgaatgacctttggcaaatcacttcccttctctg

SEQ ID NO: 28822 - DNA, 122 bp, Homo sapiens
  misc_feature (61)..(62): /note="This region represents a CpG dinucleotide"
  misc_feature (61)..(61): /note="Nucleotide may be methylated to form 5-methylcytosine"
agcaaagcctggggtgtcatgtggtctcccagatctggctctgcaatgtctcagacatgccgttcgattttgaaattctcaaagatgttccaaacagcatgcagttgatttaattttttaaa

SEQ ID NO: 28823 - DNA, 122 bp, Homo sapiens
  misc_feature (61)..(62): /note="This region represents a CpG dinucleotide"
  misc_feature (61)..(61): /note="Nucleotide may be methylated to form 5-methylcytosine"
caccgcttcctggtggtcacgccgcgggcaggacgcgggaggccaggtccgtgcatcccgcgtgtcctgagcttcggcccagggtccctccgtgccccggaaccccgccggctttcttcggc

SEQ ID NO: 28824 - DNA, 122 bp, Homo sapiens
  misc_feature (61)..(62): /note="This region represents a CpG dinucleotide"
  misc_feature (61)..(61): /note="Nucleotide may be methylated to form 5-methylcytosine"
tttgcccttatagaacctgccttaacagtgaaatgccagattcaagtgatttcacaagcccgtggcagatggtgccggggaggctggacactgtcatcaggccacagatatccctcaccatg

SEQ ID NO: 28825 - DNA, 122 bp, Homo sapiens
  misc_feature (61)..(62): /note="This region represents a CpG dinucleotide"
  misc_feature (61)..(61): /note="Nucleotide may be methylated to form 5-methylcytosine"
agacatttctccttatcttgttttcacatcagctgcagcacgatttctgttcagagcaagcgtgggtgggggttcctcccgccctgccctgtgctagctgttaaaataggagggtggtttac

SEQ ID NO: 28826 - DNA, 122 bp, Homo sapiens
  misc_feature (61)..(62): /note="This region represents a CpG dinucleotide"
  misc_feature (61)..(61): /note="Nucleotide may be methylated to form 5-methylcytosine"
gctaggcatacatagatgaacaaaacatatcttgcctttaaaacctcctcttggagctcacggtttggtaagggaaatagactaattacaatagaacatggaagtgcaataatactatatta

SEQ ID NO: 28827 - DNA, 122 bp, Homo sapiens
  misc_feature (61)..(62): /note="This region represents a CpG dinucleotide"
  misc_feature (61)..(61): /note="Nucleotide may be methylated to form 5-methylcytosine"
aaggaatactagtatgagagagaagtgagacggagaaggtaaaccagccaataaagggtgcgtcatgataccctcccaatcatagtggaaggctagaatttaatcctacaggagaattcgag

SEQ ID NO: 28828 - DNA, 122 bp, Homo sapiens
  misc_feature (61)..(62): /note="This region represents a CpG dinucleotide"
  misc_feature (61)..(61): /note="Nucleotide may be methylated to form 5-methylcytosine"
aaacatgaaccacaccagagatgggctatccagtgaggctgatatcatctcaggcgccaccgacatctctctccagcattctgtcatcttatgatcaactatgtaactccagacatccaggg

SEQ ID NO: 28829 - DNA, 122 bp, Homo sapiens
  misc_feature (61)..(62): /note="This region represents a CpG dinucleotide"
  misc_feature (61)..(61): /note="Nucleotide may be methylated to form 5-methylcytosine"
atcctacaaggcaagccactacacatattgttcttggttgttaacttacaacattcactgcgtactgttcacaggtagcctcagcctatacttcaccatggagacttcccacaggctctgga

SEQ ID NO: 28830 - DNA, 122 bp, Homo sapiens
  misc_feature (61)..(62): /note="This region represents a CpG dinucleotide"
  misc_feature (61)..(61): /note="Nucleotide may be methylated to form 5-methylcytosine"
ctggttgcattccttactactgtgtgactaacactgttaggcaaaattacctcacctctccgtgctccaactttcacatctgtgaaatggcactagccattatagtattataatacctgccg

SEQ ID NO: 28831 - DNA, 122 bp, Homo sapiens
  misc_feature (61)..(62): /note="This region represents a CpG dinucleotide"
  misc_feature (61)..(61): /note="Nucleotide may be methylated to form 5-methylcytosine"
atgcactcggtcataacaggaacacatcataccttttcttttattactcttcagttaccgcgcttgaatgcctacagaggttactgtagtaaccagctggcagccaaagctcttcttgatca

SEQ ID NO: 28832 - DNA, 122 bp, Homo sapiens
  misc_feature (61)..(62): /note="This region represents a CpG dinucleotide"
  misc_feature (61)..(61): /note="Nucleotide may be methylated to form 5-methylcytosine"
tgggaatattcatgagtcttcggaggaactagaaagggcccagtgcccagaggagctgagcgtggagcaggcagcagaccaatagcagtaagccaagaacatcaaactgcctggggctagac

SEQ ID NO: 28833 - DNA, 122 bp, Homo sapiens
  misc_feature (61)..(62): /note="This region represents a CpG dinucleotide"
  misc_feature (61)..(61): /note="Nucleotide may be methylated to form 5-methylcytosine"
ttaagtagtaaatggagctaaattgtggtaaaccacagaggtttggctggcagttgataacggcttaagagataactgtgggaagtagcctactgcccagtgtatgtactgcccttttggct

SEQ ID NO: 28834 - DNA, 122 bp, Homo sapiens
  misc_feature (61)..(62): /note="This region represents a CpG dinucleotide"
  misc_feature (61)..(61): /note="Nucleotide may be methylated to form 5-methylcytosine"
ctctcttactatcctcccagccctccatcctcatctcctccagtccgcattcagaagtcacgtgtctctattctgatgcaattgtctatctgtatgacactggaaaacttgctgccttagtt

SEQ ID NO: 28835 - DNA, 122 bp, Homo sapiens
  misc_feature (61)..(62): /note="This region represents a CpG dinucleotide"
  misc_feature (61)..(61): /note="Nucleotide may be methylated to form 5-methylcytosine"
gggttttgttgtttttgttttgtgttttgttttgttttccttttccatatactacaggggcggtgtaagaactttcccgagccatcggaggcatcaacgggaatcactggaataataatatt

SEQ ID NO: 28836 - DNA, 122 bp, Homo sapiens
  misc_feature (61)..(62): /note="This region represents a CpG dinucleotide"
  misc_feature (61)..(61): /note="Nucleotide may be methylated to form 5-methylcytosine"
cacaagagacaactctggaagcttatctcaagtacacaactctgactggcagggtttgctcgctcgtctttttagtatagtccagtttgtttagacaagcctggggttaacagagccaaggt

SEQ ID NO: 28837 - DNA, 122 bp, Homo sapiens
  misc_feature (61)..(62): /note="This region represents a CpG dinucleotide"
  misc_feature (61)..(61): /note="Nucleotide may be methylated to form 5-methylcytosine"
tccaaagcaaataatcatcaaacctgcgattctgaaattactgtccccctgactcagaggcgcagccaatgagtcatttatttacatgtaactacaagataaggagagaaaaacatcctatc

SEQ ID NO: 28838 - DNA, 122 bp, Homo sapiens
  misc_feature (61)..(62): /note="This region represents a CpG dinucleotide"
  misc_feature (61)..(61): /note="Nucleotide may be methylated to form 5-methylcytosine"
cccagaggttgtaaaattttatgtctgtacctgattcacctggtaacttgctaaaaataccgatgtccaggcctacctttctagattcggatacataaagtgacactttccatattaaataa

SEQ ID NO: 28839 - DNA, 122 bp, Homo sapiens
  misc_feature (61)..(62): /note="This region represents a CpG dinucleotide"
  misc_feature (61)..(61): /note="Nucleotide may be methylated to form 5-methylcytosine"
aaatggaaatagatctggtcagatcggtgcaggccaagcgggtgcctaacatgtgtttaccgacaacgacctagtacacgtttattaggaacattttctatttacataaagaggcagagaca

SEQ ID NO: 28840 - DNA, 122 bp, Homo sapiens
  misc_feature (61)..(62): /note="This region represents a CpG dinucleotide"
  misc_feature (61)..(61): /note="Nucleotide may be methylated to form 5-methylcytosine"
gtggccacagactgctccagctttgtaaacccattatctatatattaatccagagaagagcgctgattggccctgcttgtctcatatacttagccatgggccaatttctgttgccagggaga

SEQ ID NO: 28841 - DNA, 122 bp, Homo sapiens
  misc_feature (61)..(62): /note="This region represents a CpG dinucleotide"
  misc_feature (61)..(61): /note="Nucleotide may be methylated to form 5-methylcytosine"
atccccaaaagagtctaaatgagtcactgcaaacatgaacctccttccactaaggacaaacggaatgaagaaaagccagaaaagacagtatgtgaagagtggacgagaaatagggcaatctc

SEQ ID NO: 28842 - DNA, 122 bp, Homo sapiens
  misc_feature (61)..(62): /note="This region represents a CpG dinucleotide"
  misc_feature (61)..(61): /note="Nucleotide may be methylated to form 5-methylcytosine"
ccggcctgtttttttctatacttaaaattcagaatacacacacagcaaaacatttcttcacggagggcaccatttggttaagatgggcaaactgtacatttccagtagactcctatttcccc

SEQ ID NO: 28843 - DNA, 122 bp, Homo sapiens
  misc_feature (61)..(62): /note="This region represents a CpG dinucleotide"
  misc_feature (61)..(61): /note="Nucleotide may be methylated to form 5-methylcytosine"
ctaactggccaaaggatgtcatccagaaaagctttcacaatagggagctggccccgtggccgctgtccaggaagttcagttgcagacggactgggctgaataagatggggccacccagcaag

SEQ ID NO: 28844 - DNA, 122 bp, Homo sapiens
  misc_feature (61)..(62): /note="This region represents a CpG dinucleotide"
  misc_feature (61)..(61): /note="Nucleotide may be methylated to form 5-methylcytosine"
agttgttctgttgatgttatttaaatattcctctcatcttctcagccacaacttcaaagacgtgttcatgccagtcattcatccaaaataaatttcaattcaatgaaaagtaaataacttag

SEQ ID NO: 28845 - DNA, 122 bp, Homo sapiens
  misc_feature (61)..(62): /note="This region represents a CpG dinucleotide"
  misc_feature (61)..(61): /note="Nucleotide may be methylated to form 5-methylcytosine"
tacgggaggcagagctgagtgaccagtatgaggcggcctgcgagtcagcctgcagtgaagcggagtccacagcggcagagacgcttgacttgccactgcccagctacttccgctcccgcagc

SEQ ID NO: 28846 - DNA, 122 bp, Homo sapiens
  misc_feature (61)..(62): /note="This region represents a CpG dinucleotide"
  misc_feature (61)..(61): /note="Nucleotide may be methylated to form 5-methylcytosine"
gtggagtcgggataagggctgtagccggtactgtctaagccacgtggggcacagtgagcacgtaaggctctgactcccagcaatgggcccagttccctgaaggcagcgctgcctttctcagc

SEQ ID NO: 28847 - DNA, 122 bp, Homo sapiens
  misc_feature (61)..(62): /note="This region represents a CpG dinucleotide"
  misc_feature (61)..(61): /note="Nucleotide may be methylated to form 5-methylcytosine"
aaaggcactatttattttacacggaagctgagaatttattctaaaataatcccggattggcggtgctcccagagcagtgggcagagacacaatacctctggagatagtcactttcaacctag

SEQ ID NO: 28848 - DNA, 122 bp, Homo sapiens
  misc_feature (61)..(62): /note="This region represents a CpG dinucleotide"
  misc_feature (61)..(61): /note="Nucleotide may be methylated to form 5-methylcytosine"
atgtgccttaagtggagggaagaaaaacactggagataagggcgccaaagaacagaaggccgagagtaaaggagattatgcatcattacagaggaaggagatttagagttaagaagacagca

SEQ ID NO: 28849 - DNA, 122 bp, Homo sapiens
  misc_feature (61)..(62): /note="This region represents a CpG dinucleotide"
  misc_feature (61)..(61): /note="Nucleotide may be methylated to form 5-methylcytosine"
caaaaaacagaaaacaaagcatgacatttagtcagatgcagatcctgaatttaagacttacgctacagaggaactcctgagtttgtttgtggtcttgagtgaaaaaaaaatttgcatttcct

SEQ ID NO: 28850 - DNA, 122 bp, Homo sapiens
  misc_feature (61)..(62): /note="This region represents a CpG dinucleotide"
  misc_feature (61)..(61): /note="Nucleotide may be methylated to form 5-methylcytosine"
tttcttgcctcatggaaatgatgtgagattaaaggacatgatgcatttagatgccaagaacggtgcctggcacacaggaagcacccattagtcattcactgctatgtttctcttgtttttgt

SEQ ID NO: 28851 - DNA, 122 bp, Homo sapiens
  misc_feature (61)..(62): /note="This region represents a CpG dinucleotide"
  misc_feature (61)..(61): /note="Nucleotide may be methylated to form 5-methylcytosine"
atcctgcttgggcatttctgtgcaatgtctctttgctggaaggaccatttttaatctacccgtgtagccagtatgtcctgaggtttccattctaatcccaaaatatgtatatgtcatggcac

SEQ ID NO: 28852 - DNA, 122 bp, Homo sapiens
  misc_feature (61)..(62): /note="This region represents a CpG dinucleotide"
  misc_feature (61)..(61): /note="Nucleotide may be methylated to form 5-methylcytosine"
aagcagcagtgcggttccctaaagtgctgggcagcgatgaggtttctctctccaggccctcgggcagctcactgagcagccagtgaccccgtggtttctgtagaaggggaagtaggaaaaag

SEQ ID NO: 28853 - DNA, 122 bp, Homo sapiens
  misc_feature (61)..(62): /note="This region represents a CpG dinucleotide"
  misc_feature (61)..(61): /note="Nucleotide may be methylated to form 5-methylcytosine"
gcccaaaccaaataggagattttagctgaataccaaggtcaaagccaacttctgtgcatccgtagtagagaagaggtctgaggactgggtctgggctgtcagccattagtggtcaggaagag

SEQ ID NO: 28854 - DNA, 122 bp, Homo sapiens
  misc_feature (61)..(62): /note="This region represents a CpG dinucleotide"
  misc_feature (61)..(61): /note="Nucleotide may be methylated to form 5-methylcytosine"
catagctgaggagtggcagagcatgtctttgtgcagggcttcaagatccttttcatgatgcgatgttgtcttcaagacaggggctgaaagcctgccactccaggtcttccttgataagacct

SEQ ID NO: 28855 - DNA, 122 bp, Homo sapiens
  misc_feature (61)..(62): /note="This region represents a CpG dinucleotide"
  misc_feature (61)..(61): /note="Nucleotide may be methylated to form 5-methylcytosine"
ctttatcaaaaatggcaagaggccacatactacaataacggaacaaatacttccttttaccgtacagtaaattccttcctctgattggctaaagcttcagtgcatggttcacaagaacaaaa

SEQ ID NO: 28856 - DNA, 122 bp, Homo sapiens
  misc_feature (61)..(62): /note="This region represents a CpG dinucleotide"
  misc_feature (61)..(61): /note="Nucleotide may be methylated to form 5-methylcytosine"
agatttacatatcaacgtagccatggcattcctgaatgtagaatattgtactgttcgcctcgtttgtggtttctataataaggttaatttttgttcccttaccctcctcacttaatctcatg

SEQ ID NO: 28857 - DNA, 122 bp, Homo sapiens
  misc_feature (61)..(62): /note="This region represents a CpG dinucleotide"
  misc_feature (61)..(61): /note="Nucleotide may be methylated to form 5-methylcytosine"
ctccaaccaagaaagatgcgagcaagaggctgtggtgctcatttcagaaatctgttatcacggaaaagggaatcagaaaggtagtcctgaaaatgactacaagaagatcaactgtcctagtg

SEQ ID NO: 28858 - DNA, 122 bp, Homo sapiens
  misc_feature (61)..(62): /note="This region represents a CpG dinucleotide"
  misc_feature (61)..(61): /note="Nucleotide may be methylated to form 5-methylcytosine"
gagaaggggtagagaaaatcttccctttactcaaacaagtcagctatcaaatgtgctttccgagttgatctgttgaatgagcctaattggtggcatccacatcaatattagagaatgtttgc

SEQ ID NO: 28859 - DNA, 122 bp, Homo sapiens
  misc_feature (61)..(62): /note="This region represents a CpG dinucleotide"
  misc_feature (61)..(61): /note="Nucleotide may be methylated to form 5-methylcytosine"
tcctttgttattccctggataatattgtatccatttctgctcagcattttgactggcagccgctggacctgccctgctgaccttggggccccaaagggaggatgaggggctggggatctggg

SEQ ID NO: 28860 - DNA, 122 bp, Homo sapiens
  misc_feature (61)..(62): /note="This region represents a CpG dinucleotide"
  misc_feature (61)..(61): /note="Nucleotide may be methylated to form 5-methylcytosine"
agaaatttaaggtcgctgtaggtattgtgcgtttctacatcaaagcttcaaaaatagttccggggtgtggaggtgcacatagcttctactagcaatacacacactctggagcactcccggga

SEQ ID NO: 28861 - DNA, 122 bp, Homo sapiens
  misc_feature (61)..(62): /note="This region represents a CpG dinucleotide"
  misc_feature (61)..(61): /note="Nucleotide may be methylated to form 5-methylcytosine"
tcagcgttctcagatgtaaacaatagtgtaataaccacattttctggtttctgtatttaacgcttggacatcttagggccttgctgacctcagaaggataggccctttcagggcgagccaat

SEQ ID NO: 28862 - DNA, 122 bp, Homo sapiens
  misc_feature (61)..(62): /note="This region represents a CpG dinucleotide"
  misc_feature (61)..(61): /note="Nucleotide may be methylated to form 5-methylcytosine"
aagacactgcctagccctctcactcagcagtgagtcgtagatgattcctccagatcttgacgaggcccacaggcccttgtttaagaacgtcgcttgctgctttgctgcttctatggggcaca

SEQ ID NO: 28863 - DNA, 122 bp, Homo sapiens
  misc_feature (61)..(62): /note="This region represents a CpG dinucleotide"
  misc_feature (61)..(61): /note="Nucleotide may be methylated to form 5-methylcytosine"
caactgtttacccaggatgctgcctgcagctcatttcagtgacaacccacaagctgccctcgctggccctgtgtgctgaggacgggacatctgcacccagccctagataaccccacgtgcaa

SEQ ID NO: 28864 - DNA, 122 bp, Homo sapiens
  misc_feature (61)..(62): /note="This region represents a CpG dinucleotide"
  misc_feature (61)..(61): /note="Nucleotide may be methylated to form 5-methylcytosine"
agcatgaagaaattttttctcaaatttacctgggtaattctggcttcctgaaaattctctcgttactaaggcaacattatcccaattatattcttaccctccacattgtcacactgctcagc

SEQ ID NO: 28865 - DNA, 122 bp, Homo sapiens
  misc_feature (61)..(62): /note="This region represents a CpG dinucleotide"
  misc_feature (61)..(61): /note="Nucleotide may be methylated to form 5-methylcytosine"
atttgtgaagaagccgtgacatttgacaaggccgccagagtgcctcttcctgagcatccccgcaagggagctgctttgtggccgacacgacgttccggagcccaggctgctgcagaccctgg

SEQ ID NO: 28866 - DNA, 122 bp, Homo sapiens
  misc_feature (61)..(62): /note="This region represents a CpG dinucleotide"
  misc_feature (61)..(61): /note="Nucleotide may be methylated to form 5-methylcytosine"
agggctccgcccccaggtgagaatgttcccctctgagtctccagtgagaatgtctccatccggaaggaacacaaagcaagggataaacttgggtttcttgtatttctagtgggaggggagag

SEQ ID NO: 28867 - DNA, 122 bp, Homo sapiens
  misc_feature (61)..(62): /note="This region represents a CpG dinucleotide"
  misc_feature (61)..(61): /note="Nucleotide may be methylated to form 5-methylcytosine"
gtgttagtaaatgagcttcagacagccagaaatgactagagtgatgtgggattaagaacacggaagtggtaagtattacatgtatagttaggtgtatgattaaggccatatgaagcttaaag

SEQ ID NO: 28868 - DNA, 122 bp, Homo sapiens
  misc_feature (61)..(62): /note="This region represents a CpG dinucleotide"
  misc_feature (61)..(61): /note="Nucleotide may be methylated to form 5-methylcytosine"
cctagttaattttaagatggcgtgacatcaggaagcaggtgcttcctcgtgattagatcccgcctgtgcactgtcagcagcaacatcacatgcataaagctgcatccttttcagggcagcac

SEQ ID NO: 28869 - DNA, 122 bp, Homo sapiens
  misc_feature (61)..(62): /note="This region represents a CpG dinucleotide"
  misc_feature (61)..(61): /note="Nucleotide may be methylated to form 5-methylcytosine"
aaacaaacaaaaacaaccaaagttattttgccactatctgaagagactttcttaagcctacggcaatgttgcaacagagctggaaactgcactactgtaaagatgtacagtttaagtgcctg

SEQ ID NO: 28870 - DNA, 122 bp, Homo sapiens
  misc_feature (61)..(62): /note="This region represents a CpG dinucleotide"
  misc_feature (61)..(61): /note="Nucleotide may be methylated to form 5-methylcytosine"
agctgagattgtgccactgcactccaacctcagcaacagagcaacactatgtctcaaaaacgagtgcaaactttggagcctggccattcaggttcaagttctggctcaaccattgtgacctt

SEQ ID NO: 28871 - DNA, 122 bp, Homo sapiens
  misc_feature (61)..(62): /note="This region represents a CpG dinucleotide"
  misc_feature (61)..(61): /note="Nucleotide may be methylated to form 5-methylcytosine"
gaatgatttttcctatttgcacagactttgatattttacaagccttagcttcaagcctgacgaggaagtaaaaccaaatctggagtcaaagaacctagctttggccctaacttggtcgttat

SEQ ID NO: 28872 - DNA, 122 bp, Homo sapiens
  misc_feature (61)..(62): /note="This region represents a CpG dinucleotide"
  misc_feature (61)..(61): /note="Nucleotide may be methylated to form 5-methylcytosine"
cttctatgacaaagttttaaaagtactgtcacatttgacacattatctcatccaagcctgcggcaacctggcaaaggcggtaccattaatcctgttctacaaggaaggaaactaaggcagag

SEQ ID NO: 28873 - DNA, 122 bp, Homo sapiens
  misc_feature (61)..(62): /note="This region represents a CpG dinucleotide"
  misc_feature (61)..(61): /note="Nucleotide may be methylated to form 5-methylcytosine"
ttagggagcaaaaattgcaaaaaaattgccagagcctctgtggcctggctccagtccctccgcattcatcactgagggcaggtgacttaagcctgcagaggcagtgcatgcttcttccttca

SEQ ID NO: 28874 - DNA, 122 bp, Homo sapiens
  misc_feature (61)..(62): /note="This region represents a CpG dinucleotide"
  misc_feature (61)..(61): /note="Nucleotide may be methylated to form 5-methylcytosine"
gactgccaatgggcatggggtttctttttagggtgatgaaaatgttctgaaattttatcacgggaatggttgcacaactctgtgtaacttagaattcagtgactcctaaaaccaatgaatag

SEQ ID NO: 28875 - DNA, 122 bp, Homo sapiens
  misc_feature (61)..(62): /note="This region represents a CpG dinucleotide"
  misc_feature (61)..(61): /note="Nucleotide may be methylated to form 5-methylcytosine"
tatggtgatgcacactccagctctgtctcgctcccctctcagcacagtcccccaactccccgcattttgggcctggctttatccagggctggcattatccaggcccaggtgtggccaaaggg

SEQ ID NO: 28876 - DNA, 122 bp, Homo sapiens
  misc_feature (61)..(62): /note="This region represents a CpG dinucleotide"
  misc_feature (61)..(61): /note="Nucleotide may be methylated to form 5-methylcytosine"
acaagattaacagaaccagaaacgtcataggtataaaagtccatacaaatacaaaactaacggaagtgtgctccctttgccagagggccaagaggcatcactgcctgagtgccagaggtata

SEQ ID NO: 28877 - DNA, 122 bp, Homo sapiens
  misc_feature (61)..(62): /note="This region represents a CpG dinucleotide"
  misc_feature (61)..(61): /note="Nucleotide may be methylated to form 5-methylcytosine"
ggtgtgctgggcctggtctgactcacaataacctgcaagagtgtattgtgtacatctctacgcaacagcttgaagtcactcatgataggaatctttatgccactgaaattagcaaatgccac

SEQ ID NO: 28878 - DNA, 122 bp, Homo sapiens
  misc_feature (61)..(62): /note="This region represents a CpG dinucleotide"
  misc_feature (61)..(61): /note="Nucleotide may be methylated to form 5-methylcytosine"
tcaaaggacgaggcttcaccctttatgctactgaattccatttatctccttattactcaccgtccacacctatgatcattgactgatttaaaatctccccacctcccccagtcacttttcat

SEQ ID NO: 28879 - DNA, 122 bp, Homo sapiens
  misc_feature (61)..(62): /note="This region represents a CpG dinucleotide"
  misc_feature (61)..(61): /note="Nucleotide may be methylated to form 5-methylcytosine"
tggtccaagtggtcaatttgagcagtctgttgaatatagaggtttaaggagaaaagtctacgatgcatgaatggattttggctagcacagttttacacattgtaggcttccagtaaatattt

SEQ ID NO: 28880 - DNA, 122 bp, Homo sapiens
  misc_feature (61)..(62): /note="This region represents a CpG dinucleotide"
  misc_feature (61)..(61): /note="Nucleotide may be methylated to form 5-methylcytosine"
cagaggacctgctatgtggcaggaagtgctgggagccctgaacacatgtatggccctcctcgaggactgactgagcagctctggctgatgggggtgtggctgagggggaggaggggaggggc

SEQ ID NO: 28881 - DNA, 122 bp, Homo sapiens
  misc_feature (61)..(62): /note="This region represents a CpG dinucleotide"
  misc_feature (61)..(61): /note="Nucleotide may be methylated to form 5-methylcytosine"
ctggattcttgcacactgctcagtgatgtggtggaatgcaatatggaagtgggaacagcacgagaatgaaggcaggctttgccactctgactagctctgtgaccttggcaatccactcgatc

SEQ ID NO: 28882 - DNA, 122 bp, Homo sapiens
  misc_feature (61)..(62): /note="This region represents a CpG dinucleotide"
  misc_feature (61)..(61): /note="Nucleotide may be methylated to form 5-methylcytosine"
ggcacctctgtctccaacccagccccatgtgtcaaatgccttctgggtgtctccagagagcgagctgtctcttggcttcctcacctctcgcctcccacgtgcctcatatcactccatgatca

SEQ ID NO: 28883 - DNA, 122 bp, Homo sapiens
  misc_feature (61)..(62): /note="This region represents a CpG dinucleotide"
  misc_feature (61)..(61): /note="Nucleotide may be methylated to form 5-methylcytosine"
atgtcacttatagctgtggaaccctggacaacttatttaatctctttgtccttcaaattccgtatatgtagaatgtgggtgatgataatacctaccacatagggttattgtgaggattaaat

SEQ ID NO: 28884 - DNA, 122 bp, Homo sapiens
  misc_feature (61)..(62): /note="This region represents a CpG dinucleotide"
  misc_feature (61)..(61): /note="Nucleotide may be methylated to form 5-methylcytosine"
ggctatgagtatatgtgactaatacactactgtcaatctcatctgcccagaatcaaatgtcgtgtgtttggccatctctgtaaacctaggatgggaatccctccctcaccaatggagtgaat

SEQ ID NO: 28885 - DNA, 122 bp, Homo sapiens
  misc_feature (61)..(62): /note="This region represents a CpG dinucleotide"
  misc_feature (61)..(61): /note="Nucleotide may be methylated to form 5-methylcytosine"
taaccctaatattcccttgagattttaagtttcgtaatcataatttgtcctaagtgcccacggtgtgggagaagctgtgtatttatgtttctgcagatgatctatcctcctacttcacagca

SEQ ID NO: 28886 - DNA, 122 bp, Homo sapiens
  misc_feature (61)..(62): /note="This region represents a CpG dinucleotide"
  misc_feature (61)..(61): /note="Nucleotide may be methylated to form 5-methylcytosine"
gaaactagttagtgctgctgcctctgctggtagcttgttaaaacctgaactggggccgggcgcagtggctcacgcctgtaatcccagcactttgggaggccgaggcgggcggatcacgaggt

SEQ ID NO: 28887 - DNA, 122 bp, Homo sapiens
  misc_feature (61)..(62): /note="This region represents a CpG dinucleotide"
  misc_feature (61)..(61): /note="Nucleotide may be methylated to form 5-methylcytosine"
atgtcacgactaacagatcactccaggcatagtagttctcatcggctcaatgaacagtcacgacatagcagcatcagagatctcagtaataatcccatgactcatatcacacatggcaccag

SEQ ID NO: 28888 - DNA, 122 bp, Homo sapiens
  misc_feature (61)..(62): /note="This region represents a CpG dinucleotide"
  misc_feature (61)..(61): /note="Nucleotide may be methylated to form 5-methylcytosine"
caaaagatgccaagggtgtgatgaaacaaaaaatgaaatgaggttaagggagaaaggatgcgatgcaattgcatgtggtgtattgcaacacaagcaactgctccaggaagtatcaaaaacaa

SEQ ID NO: 28889 - DNA, 122 bp, Homo sapiens
  misc_feature (61)..(62): /note="This region represents a CpG dinucleotide"
  misc_feature (61)..(61): /note="Nucleotide may be methylated to form 5-methylcytosine"
atgtggacctgcttgcctcttcccgccactggccgcctgtctatgtggtagatatggccacgtcagtggccctgtgtgctgacctctgctacccagagctgactaaccagatgtgggggagg

SEQ ID NO: 28890 - DNA, 122 bp, Homo sapiens
  misc_feature (61)..(62): /note="This region represents a CpG dinucleotide"
  misc_feature (61)..(61): /note="Nucleotide may be methylated to form 5-methylcytosine"
ggattatagtgtgagccgccacgcccggccgctgggattgcaggcctgagctcccgtgcccggccatcgttgatgtttttatgaatcacttttagattttgtagattaacctcttccatcat

SEQ ID NO: 28891 - DNA, 122 bp, Homo sapiens
  misc_feature (61)..(62): /note="This region represents a CpG dinucleotide"
  misc_feature (61)..(61): /note="Nucleotide may be methylated to form 5-methylcytosine"
gaaggtgagagaccatctctggggtccactctgtggggtgtggctgagatgctgtctagccgggcgacctgcctactttccagctgtgtggcttggggcaagttacttaacctctctgagtc

SEQ ID NO: 28892 - DNA, 122 bp, Homo sapiens
  misc_feature (61)..(62): /note="This region represents a CpG dinucleotide"
  misc_feature (61)..(61): /note="Nucleotide may be methylated to form 5-methylcytosine"
aattggctccaatcagggaaagccaggtctgggctttataaacagtgacagcagctccaccgttagaagagcaggtagaaaggtcacactggaaacaccatttccaagcacagagtaattac

SEQ ID NO: 28893 - DNA, 122 bp, Homo sapiens
  misc_feature (61)..(62): /note="This region represents a CpG dinucleotide"
  misc_feature (61)..(61): /note="Nucleotide may be methylated to form 5-methylcytosine"
gactgggcagcaggactgtcctgccagcttgtcaggtctcactgaggctttgagggtgggcgcaggggctgtgctgggccctaccctcagagggaccccaccctccccatggcctacctggc

SEQ ID NO: 28894 - DNA, 122 bp, Homo sapiens
  misc_feature (61)..(62): /note="This region represents a CpG dinucleotide"
  misc_feature (61)..(61): /note="Nucleotide may be methylated to form 5-methylcytosine"
agtgttctggtggagccttttgagttttttcacgggctctccatagccccaccctgaggacgggagccctttggatggggccggtgtcagcaaaggaggcacaagagtctcagctgctcgac

SEQ ID NO: 28895 - DNA, 122 bp, Homo sapiens
  misc_feature (61)..(62): /note="This region represents a CpG dinucleotide"
  misc_feature (61)..(61): /note="Nucleotide may be methylated to form 5-methylcytosine"
ctccctgctcctgtccatctcttctataaacaccaccttgcccgagagccaagcccagcccggtttgcctctggagtctggaacaatgactcagtttgtgcctcatcacagtttgagcccga

SEQ ID NO: 28896 - DNA, 122 bp, Homo sapiens
  misc_feature (61)..(62): /note="This region represents a CpG dinucleotide"
  misc_feature (61)..(61): /note="Nucleotide may be methylated to form 5-methylcytosine"
ctggctgtgtctgcagctgggggacagggcaggctgagggcatggccacctgtccgcacccgcagatcatcctcatgctgactaagaagtgccaggagcagcagcaggacaccaaggaggcc

SEQ ID NO: 28897 - DNA, 122 bp, Homo sapiens
  misc_feature (61)..(62): /note="This region represents a CpG dinucleotide"
  misc_feature (61)..(61): /note="Nucleotide may be methylated to form 5-methylcytosine"
tcctgttatttattgtatcctgttatttattgactgatagatcaaggataatctaacctacgcctctcaacctggcctcctacagacagacatcaaatcacctcagtcagacagtgctatga

SEQ ID NO: 28898 - DNA, 122 bp, Homo sapiens
  misc_feature (61)..(62): /note="This region represents a CpG dinucleotide"
  misc_feature (61)..(61): /note="Nucleotide may be methylated to form 5-methylcytosine"
ttggtatgaaggtcacctatgagtgatgatcacatcatgggcgtgggccagctgacaaagcgcttcctcagctgtgccctggcctcacacgggacacatggtggacacctgacaagacttag

SEQ ID NO: 28899 - DNA, 122 bp, Homo sapiens
  misc_feature (61)..(62): /note="This region represents a CpG dinucleotide"
  misc_feature (61)..(61): /note="Nucleotide may be methylated to form 5-methylcytosine"
ggacaggagtcacactgctggaggcggaaaggtggaggaagagctgaggaaaccaggacacggatgcagaccagtttttcaagagattcgacagcaaaggggagggttaaagtacagcagag

SEQ ID NO: 28900 - DNA, 122 bp, Homo sapiens
  misc_feature (61)..(62): /note="This region represents a CpG dinucleotide"
  misc_feature (61)..(61): /note="Nucleotide may be methylated to form 5-methylcytosine"
gaggtgaattcccctctactagtgtttcctgtcacactatagctaccccaaagaggttgtcgtacagggttaaacaatgtgagagctggagaaggttctagaaatcacccaatcaaatgagg

SEQ ID NO: 28901 - DNA, 122 bp, Homo sapiens
  misc_feature (61)..(62): /note="This region represents a CpG dinucleotide"
  misc_feature (61)..(61): /note="Nucleotide may be methylated to form 5-methylcytosine"
cattttcatttcatttttaataaaccgttttgctgtgtcacccaggctgcagggctttgacgccatcctagctcattgctgcctagatctgctgggctcaagtgatcttcctccttcaacct

SEQ ID NO: 28902 - DNA, 122 bp, Homo sapiens
  misc_feature (61)..(62): /note="This region represents a CpG dinucleotide"
  misc_feature (61)..(61): /note="Nucleotide may be methylated to form 5-methylcytosine"
ccccttgctggcccttcagagctacagagggtccttgttccccatcttgtctcttccatgcggttgtgtctgctctattcattggccaggccctgactcagcaccaccactgcctttgggtt

SEQ ID NO: 28903 - DNA, 122 bp, Homo sapiens
  misc_feature (61)..(62): /note="This region represents a CpG dinucleotide"
  misc_feature (61)..(61): /note="Nucleotide may be methylated to form 5-methylcytosine"
ccggcaggatgcttttctagccctgactcagaaagcccgggggaagagagtgggtggagacgtgacaagtgataaactgaaagactggctgatttcacggcagcggtactggggcacaccaa

SEQ ID NO: 28904 - DNA, 122 bp, Homo sapiens
  misc_feature (61)..(62): /note="This region represents a CpG dinucleotide"
  misc_feature (61)..(61): /note="Nucleotide may be methylated to form 5-methylcytosine"
ttggtgaggtcctctggccccgccccgccagggaggatttccaggccggcccgaccagctcgccctgcatacacttcttggctgtgtgcgctcagcaggacgtgggaggctccggcttcaag

SEQ ID NO: 28905 - DNA, 122 bp, Homo sapiens
  misc_feature (61)..(62): /note="This region represents a CpG dinucleotide"
  misc_feature (61)..(61): /note="Nucleotide may be methylated to form 5-methylcytosine"
gaaaccagacaagctagagttgtcaccacaccctggactcagagaacttgggtacttcaccgacggccacctcccatcgccctttcattcttcatgggcagggccttgcaagccttggtgat

SEQ ID NO: 28906 - DNA, 122 bp, Homo sapiens
  misc_feature (61)..(62): /note="This region represents a CpG dinucleotide"
  misc_feature (61)..(61): /note="Nucleotide may be methylated to form 5-methylcytosine"
tggattaataccaattataaaagggctttgaggctgcaagttcaagctcttcctctctctcgctctctcttttgccttccaccatgggatgactcagcatgaaggccctcaccagacactgg

SEQ ID NO: 28907 - DNA, 122 bp, Homo sapiens
  misc_feature (61)..(62): /note="This region represents a CpG dinucleotide"
  misc_feature (61)..(61): /note="Nucleotide may be methylated to form 5-methylcytosine"
taatcatactgtttgtgattcatgtcaaatactgcagcatacacatccatggttaatacacgagcaccatttgttattgactgatgtgaggtggttggtctttgttaaattcaaaaatggaa

SEQ ID NO: 28908 - DNA, 122 bp, Homo sapiens
  misc_feature (61)..(62): /note="This region represents a CpG dinucleotide"
  misc_feature (61)..(61): /note="Nucleotide may be methylated to form 5-methylcytosine"
ggaccgggaggaaccaactatgggcaagtaagtgccagctgggagtgagccatatgcccacgcatgttagcccaggagccactggtgctgctgggtccctgccaacccacccagggaggggc

SEQ ID NO: 28909 - DNA, 122 bp, Homo sapiens
  misc_feature (61)..(62): /note="This region represents a CpG dinucleotide"
  misc_feature (61)..(61): /note="Nucleotide may be methylated to form 5-methylcytosine"
tttttgtcttggtgctttcaaggttttttctgtgtctttggcttcgaaacattttgactacgttgtgtgtgtttgtaaatcgttgagtttattatcatttgagtttgttgagccttctggat

SEQ ID NO: 28910 - DNA, 122 bp, Homo sapiens
  misc_feature (61)..(62): /note="This region represents a CpG dinucleotide"
  misc_feature (61)..(61): /note="Nucleotide may be methylated to form 5-methylcytosine"
ctgcatacacgggaagagagagacgcagaggcctgagcgccacgccagtccaggtggaaacgcttgagccgcctcacctgcatttgcagggctcagcaggcaagctaagcctcgccccgctg

SEQ ID NO: 28911 - DNA, 122 bp, Homo sapiens
  misc_feature (61)..(62): /note="This region represents a CpG dinucleotide"
  misc_feature (61)..(61): /note="Nucleotide may be methylated to form 5-methylcytosine"
tttcttcggcctctcagcttcctcagacttttgcagataggtttgcgtaagtctgcccagcgtggagcaatattttagatattaagtccttttttatttatttatttttattttttttttga

SEQ ID NO: 28912 - DNA, 122 bp, Homo sapiens
  misc_feature (61)..(62): /note="This region represents a CpG dinucleotide"
  misc_feature (61)..(61): /note="Nucleotide may be methylated to form 5-methylcytosine"
gtgatctgcccgcctcagcctcccaaagtgctgggattacaggcatgagccaccgcacctcgccgggtaatgattcttgagacaagaggtggttaagtagcattattatgtaatgtttatat

SEQ ID NO: 28913 - DNA, 122 bp, Homo sapiens
  misc_feature (61)..(62): /note="This region represents a CpG dinucleotide"
  misc_feature (61)..(61): /note="Nucleotide may be methylated to form 5-methylcytosine"
taggtcggggtggagcctcagaggctgtatctgaatgagcccctaagtggatctgctgctcggaagaggtcagtgtggaaaagcctgtcttcccaggctgttccacagaatccaaaacaggc

SEQ ID NO: 28914 - DNA, 122 bp, Homo sapiens
  misc_feature (61)..(62): /note="This region represents a CpG dinucleotide"
  misc_feature (61)..(61): /note="Nucleotide may be methylated to form 5-methylcytosine"
gagaggaagcttccagataaacatacagaagtgcctaaacagctaatcactctaggcttccgcttccaggccctataattagaagtccttctttttccttgtattcccagatgacgcaaatg

SEQ ID NO: 28915 - DNA, 122 bp, Homo sapiens
  misc_feature (61)..(62): /note="This region represents a CpG dinucleotide"
  misc_feature (61)..(61): /note="Nucleotide may be methylated to form 5-methylcytosine"
ttgtagcttcatccctgaggcagtgttcaacttctccttcagataactaatggggaaattcgttgaaaatatggatgcctgccaggtagacaggggaattttgactttaaaaaaagattgca

SEQ ID NO: 28916 - DNA, 122 bp, Homo sapiens
  misc_feature (61)..(62): /note="This region represents a CpG dinucleotide"
  misc_feature (61)..(61): /note="Nucleotide may be methylated to form 5-methylcytosine"
aagataagcatctgagattgtcaggcatgatgtagccacaagacactgatgtagttaaagcggagaaactagaaaagttgtattttttagctggttggactttgcaggaagattttctctaa

SEQ ID NO: 28917 - DNA, 122 bp, Homo sapiens
  misc_feature (61)..(62): /note="This region represents a CpG dinucleotide"
  misc_feature (61)..(61): /note="Nucleotide may be methylated to form 5-methylcytosine"
cgtcgcaggcctcggggccatgctcctctttgctctcggcctcggcgtcgctctcaccctcgctgggacataaatctaccacaggcgaaggaaaaaaccaaggcagaagggcgttatctcca

SEQ ID NO: 28918 - DNA, 122 bp, Homo sapiens
  misc_feature (61)..(62): /note="This region represents a CpG dinucleotide"
  misc_feature (61)..(61): /note="Nucleotide may be methylated to form 5-methylcytosine"
ttacgtttcaaaagacaccaggaaatgcgaagcttgaactatagcttataacagagctcacgacaggttccctttctccttttcctttctttcctgtcttttcttcttcctttttaaatgga

SEQ ID NO: 28919 - DNA, 122 bp, Homo sapiens
  misc_feature (61)..(62): /note="This region represents a CpG dinucleotide"
  misc_feature (61)..(61): /note="Nucleotide may be methylated to form 5-methylcytosine"
aggatcgcttgagcccaggaggtcacatggtgaccttggaagcaaatgctccctcaaacacgagatgactgcagccctggtctacatctcagttgcagtcttgtgaaatcttgagtcagagg

SEQ ID NO: 28920 - DNA, 122 bp, Homo sapiens
  misc_feature (61)..(62): /note="This region represents a CpG dinucleotide"
  misc_feature (61)..(61): /note="Nucleotide may be methylated to form 5-methylcytosine"
tgccatccaaggcttcccagtgcccctggagaccacacagcccctttacacaggaaatgacgtgattcctgataagcaagcagtacacactgcacagcttccttcccttcctccccctgcca

SEQ ID NO: 28921 - DNA, 122 bp, Homo sapiens
  misc_feature (61)..(62): /note="This region represents a CpG dinucleotide"
  misc_feature (61)..(61): /note="Nucleotide may be methylated to form 5-methylcytosine"
gacctgcttttcccagggctctccagggagtccctgcacagccctcaagagcctgccctgcgttatcatcctcaaggtcaagaaacttccttgggggagtctccagagacaggcagcctggc

SEQ ID NO: 28922 - DNA, 122 bp, Homo sapiens
  misc_feature (61)..(62): /note="This region represents a CpG dinucleotide"
  misc_feature (61)..(61): /note="Nucleotide may be methylated to form 5-methylcytosine"
agtttttagtggaaatgctaatggcagtgggaaaggttgcctcactttcagagagactctcgctgtctgcacccttttaataattgctcttcctggcaaggctgccacttccctgcctcccc

SEQ ID NO: 28923 - DNA, 122 bp, Homo sapiens
  misc_feature (61)..(62): /note="This region represents a CpG dinucleotide"
  misc_feature (61)..(61): /note="Nucleotide may be methylated to form 5-methylcytosine"
caaaagaggttttcaacagtgtcagcagaggctatagtgatgagtaaggaagttgataaacggcaacatctgaaatagctactcgccctgaataggcaggtggagaatattagttacacgtg

SEQ ID NO: 28924 - DNA, 122 bp, Homo sapiens
  misc_feature (61)..(62): /note="This region represents a CpG dinucleotide"
  misc_feature (61)..(61): /note="Nucleotide may be methylated to form 5-methylcytosine"
tcagtatttgcctaacaataagcatttcccagcctggagggagggcaggcttctaacgggcgaggcacctgccctgccaccatttccctgtggtcagtcatgtcctgttccccacctcatgg

SEQ ID NO: 28925 - DNA, 122 bp, Homo sapiens
  misc_feature (61)..(62): /note="This region represents a CpG dinucleotide"
  misc_feature (61)..(61): /note="Nucleotide may be methylated to form 5-methylcytosine"
tactcaccatttgtgcatcctccatgagcttaagaaataaaaccttcaaagtgcaattgacgtctcctatttgcccttccctgagagcactatccttactctctgccataggttaacactat

SEQ ID NO: 28926 - DNA, 122 bp, Homo sapiens
  misc_feature (61)..(62): /note="This region represents a CpG dinucleotide"
  misc_feature (61)..(61): /note="Nucleotide may be methylated to form 5-methylcytosine"
tggtttcctgggcaggttctggggcagagttctatttgtatacatgatctggccattgttcgaatgaatatccagtctctcattaccttaacaactccctcagaacacccgaactgtgtgtt

SEQ ID NO: 28927 - DNA, 122 bp, Homo sapiens
  misc_feature (61)..(62): /note="This region represents a CpG dinucleotide"
  misc_feature (61)..(61): /note="Nucleotide may be methylated to form 5-methylcytosine"
ccctttagtgccaagatgtggagtagaacccagatccattggcaacttactgatgttaaccgaagtgtattgtatgccacctttgacagtcagagctcactagaggataaggaagctctgac

SEQ ID NO: 28928 - DNA, 122 bp, Homo sapiens
  misc_feature (61)..(62): /note="This region represents a CpG dinucleotide"
  misc_feature (61)..(61): /note="Nucleotide may be methylated to form 5-methylcytosine"
ccctcaattgtctggagtggcagtggcggccagtgagtggaggcctcagccacttctatccgtcctgtgaccactccatagaacagagctgagcttctaaacatccacttcaatgtggatgg

SEQ ID NO: 28929 - DNA, 122 bp, Homo sapiens
  misc_feature (61)..(62): /note="This region represents a CpG dinucleotide"
  misc_feature (61)..(61): /note="Nucleotide may be methylated to form 5-methylcytosine"
gctgcagaatagaagtctgcgaattgagtgatttatagcctttttgtttgtttgtttttacgctgactccactccgactttgaggaggcagaggatcccttgacatgagcactcttcactgt

SEQ ID NO: 28930 - DNA, 122 bp, Homo sapiens
  misc_feature (61)..(62): /note="This region represents a CpG dinucleotide"
  misc_feature (61)..(61): /note="Nucleotide may be methylated to form 5-methylcytosine"
atcccagcctggggctggctctcacttttcagggcactgtgcaagacaggtgtaagttttcgtttctgttttgagcagacatggggttaaaaagcagaaagggatcatctatagaaactgaa

SEQ ID NO: 28931 - DNA, 122 bp, Homo sapiens
  misc_feature (61)..(62): /note="This region represents a CpG dinucleotide"
  misc_feature (61)..(61): /note="Nucleotide may be methylated to form 5-methylcytosine"
ttacagcacttgagccacaacgcccagccaattcttgacactcactttaaacccctgatacgctgtggcactgtgcttgtccgagctggttcttcctgagtgcacactttcccctagccatg

SEQ ID NO: 28932 - DNA, 122 bp, Homo sapiens
  misc_feature (61)..(62): /note="This region represents a CpG dinucleotide"
  misc_feature (61)..(61): /note="Nucleotide may be methylated to form 5-methylcytosine"
ctctgtcatagctactcaattctgccactgcagcacaaaagccatacacaattatgtaaacgaatgagtatggctgtgctccaacaaaatcttatttacaaaaaaaaaaaaaagtgggccaa

SEQ ID NO: 28933 - DNA, 122 bp, Homo sapiens
  misc_feature (61)..(62): /note="This region represents a CpG dinucleotide"
  misc_feature (61)..(61): /note="Nucleotide may be methylated to form 5-methylcytosine"
agtcactccctgattaagtttgcgatagtccacagtcattctctgagatcctttgacttccgtgcaggccaaacagatgagtcaaatggggttgtgatagactactgtccttacttctttca

SEQ ID NO: 28934 - DNA, 122 bp, Homo sapiens
  misc_feature (61)..(62): /note="This region represents a CpG dinucleotide"
  misc_feature (61)..(61): /note="Nucleotide may be methylated to form 5-methylcytosine"
gcttctctttttgagacatttcaagtacttttctcagtattatgaggtagattacatgtacgaatgactcaacatttctgaggctgcttaagagtgttttctggtaagcctagccactacat

SEQ ID NO: 28935 - DNA, 122 bp, Homo sapiens
  misc_feature (61)..(62): /note="This region represents a CpG dinucleotide"
  misc_feature (61)..(61): /note="Nucleotide may be methylated to form 5-methylcytosine"
attggggtgggctggggcccatgggcctgtatatccaacaaaggtcaaagggcctgggtgcgttgctgctcctgggttctcagcggagcattgagccctctagaaataagatgccctgtgga

SEQ ID NO: 28936 - DNA, 122 bp, Homo sapiens
  misc_feature (61)..(62): /note="This region represents a CpG dinucleotide"
  misc_feature (61)..(61): /note="Nucleotide may be methylated to form 5-methylcytosine"
ctccaccatgttatgatgcaacatgagacactcaccagaagctgaccagatgggctgccccgtcttggactttccagcctctagaataatgagctaaataaaccacttttctttacaaatta

SEQ ID NO: 28937 - DNA, 122 bp, Homo sapiens
  misc_feature (61)..(62): /note="This region represents a CpG dinucleotide"
  misc_feature (61)..(61): /note="Nucleotide may be methylated to form 5-methylcytosine"
ggaagcactgatgtggcactaaatattcctgcagcttcagccttctcccttgggggcccacgtcatcgctgtgagcctggtttctggaatgtttttgatatgaagcatccaggcaggtgagg

SEQ ID NO: 28938 - DNA, 122 bp, Homo sapiens
  misc_feature (61)..(62): /note="This region represents a CpG dinucleotide"
  misc_feature (61)..(61): /note="Nucleotide may be methylated to form 5-methylcytosine"
cttcactttggtttcctcctgccttaaatgggcataccacctggcattaggattaatgtgcgtaaagtacttagaactcagcccaggtgagttctccttaactcagcctagaagagatcatc

SEQ ID NO: 28939 - DNA, 122 bp, Homo sapiens
  misc_feature (61)..(62): /note="This region represents a CpG dinucleotide"
  misc_feature (61)..(61): /note="Nucleotide may be methylated to form 5-methylcytosine"
aatcgttgtgagtgctcaatgtaaatgagttgagactgctgtcaaaattccttataaacacgtgtgtttctaagggaaaagtgagagaaaccacatcttgcaactgtctgaatgttctaaaa

SEQ ID NO: 28940 - DNA, 122 bp, Homo sapiens
  misc_feature (61)..(62): /note="This region represents a CpG dinucleotide"
  misc_feature (61)..(61): /note="Nucleotide may be methylated to form 5-methylcytosine"
ttttttttttttttccaatttctggcggcgggcggctggggaagcagctctgtggtctcccggcgggtgaggccgagacagagaccaacctctaggcggcgccctggcgttgagtccgcgct

SEQ ID NO: 28941 - DNA, 122 bp, Homo sapiens
  misc_feature (61)..(62): /note="This region represents a CpG dinucleotide"
  misc_feature (61)..(61): /note="Nucleotide may be methylated to form 5-methylcytosine"
cttttgtataagacgtcagttatgtcttcctaccagactgtagaccacatgaggacaagacgcgcctccttgtcatctgtgtccaccagtctactagaaaagctgaaaaaaggaaaggggat

SEQ ID NO: 28942 - DNA, 122 bp, Homo sapiens
  misc_feature (61)..(62): /note="This region represents a CpG dinucleotide"
  misc_feature (61)..(61): /note="Nucleotide may be methylated to form 5-methylcytosine"
aaaggaaaaggaagaaggggaatgtccaggagtcgactcaggcctgtggagtcttcttcccgcctggagggtgccttccagtaaggtagcattgtctaatctttagcacttccccaggccaa

SEQ ID NO: 28943 - DNA, 122 bp, Homo sapiens
  misc_feature (61)..(62): /note="This region represents a CpG dinucleotide"
  misc_feature (61)..(61): /note="Nucleotide may be methylated to form 5-methylcytosine"
atcaccttggttgtttggatgactcagcccttccagcctgtaggcactggaaagtccaaacggaacagagcagaggcagttccacaacacagttccccagcacagctgttttgttaaggaat

SEQ ID NO: 28944 - DNA, 122 bp, Homo sapiens
  misc_feature (61)..(62): /note="This region represents a CpG dinucleotide"
  misc_feature (61)..(61): /note="Nucleotide may be methylated to form 5-methylcytosine"
attttgagctatcacaaagaccaatgatgagtcatgcactttattccagaagttcaacctcgtattatggttaggctcttacttagttacatgtgaaataaggcatctggttagaaacagca

SEQ ID NO: 28945 - DNA, 122 bp, Homo sapiens
  misc_feature (61)..(62): /note="This region represents a CpG dinucleotide"
  misc_feature (61)..(61): /note="Nucleotide may be methylated to form 5-methylcytosine"
taattgcagttcagtaatgcctcctttcccttgaaatgtaaccacattcagctatgactacgctggttctcaggagcagaggaaaaatatatgatgtaatgggatgagttttttggggcact

SEQ ID NO: 28946 - DNA, 122 bp, Homo sapiens
  misc_feature (61)..(62): /note="This region represents a CpG dinucleotide"
  misc_feature (61)..(61): /note="Nucleotide may be methylated to form 5-methylcytosine"
tgccatactcagatccaatacaagtgaagacattcagcaatggttattcccaagcacgcacgagggacctgccccaagccaggtgctgtgtcagggccctatctacaacatggcttcgagcc

SEQ ID NO: 28947 - DNA, 122 bp, Homo sapiens
  misc_feature (61)..(62): /note="This region represents a CpG dinucleotide"
  misc_feature (61)..(61): /note="Nucleotide may be methylated to form 5-methylcytosine"
tcataattcagatgtcacctcctcagagaggtcttccctgactgctctagctaaaattaccgcctctcctccactccccaacagcagatacatatattatttttctccctgtaactctaact

SEQ ID NO: 28948 - DNA, 122 bp, Homo sapiens
  misc_feature (61)..(62): /note="This region represents a CpG dinucleotide"
  misc_feature (61)..(61): /note="Nucleotide may be methylated to form 5-methylcytosine"
taatagcagccctactcctccagtcactcaaggccaaaatgctgacaattgtcctggactcgtctctctcacaccatatctcactctgtcagtaaatcctgttggctctaccttcaaaatac

SEQ ID NO: 28949 - DNA, 122 bp, Homo sapiens
  misc_feature (61)..(62): /note="This region represents a CpG dinucleotide"
  misc_feature (61)..(61): /note="Nucleotide may be methylated to form 5-methylcytosine"
cctccatgagtcaagccagatccagcggcttagtcaacaagaagcacaacacagaaagtgcgtgtttgagagatgacagggagatgtcatgggcagatgtgcctataaagaagaatgtaaca

SEQ ID NO: 28950 - DNA, 122 bp, Homo sapiens
  misc_feature (61)..(62): /note="This region represents a CpG dinucleotide"
  misc_feature (61)..(61): /note="Nucleotide may be methylated to form 5-methylcytosine"
cacatttctgtagtttcaagacaggagttaacccaagaatgacaaacttccttgacttggcgatttagaaaaaattacggcccagtttggtcagctaagaggcacacccaagaaacagcttt

SEQ ID NO: 28951 - DNA, 122 bp, Homo sapiens
  misc_feature (61)..(62): /note="This region represents a CpG dinucleotide"
  misc_feature (61)..(61): /note="Nucleotide may be methylated to form 5-methylcytosine"
aaacagcaagtgccgatgtgtgctctgcaggcctgggcacacagtgtacctctgttctcacgtgtggcaagaaggacaaagtgctaaaccagaaaatttacaggagctaaatctcccaagga

SEQ ID NO: 28952 - DNA, 122 bp, Homo sapiens
  misc_feature (61)..(62): /note="This region represents a CpG dinucleotide"
  misc_feature (61)..(61): /note="Nucleotide may be methylated to form 5-methylcytosine"
aatacagcttcaagttactgtctagtctccttttatttcagcctgaaagactcacttcagcgtttcttgcaggacaggtctggtgataatgaactctctcagattttgttaatctggaaatg

SEQ ID NO: 28953 - DNA, 122 bp, Homo sapiens
  misc_feature (61)..(62): /note="This region represents a CpG dinucleotide"
  misc_feature (61)..(61): /note="Nucleotide may be methylated to form 5-methylcytosine"
ggttacatgagttccttctcagacccttctctgtgtgtccaccttggggtgatgtgtgtgcgtgaaccaacctgccgaaaattaaacagacaaaagaaaaaaaatatgaaaacaaaaagagc

SEQ ID NO: 28954 - DNA, 122 bp, Homo sapiens
  misc_feature (61)..(62): /note="This region represents a CpG dinucleotide"
  misc_feature (61)..(61): /note="Nucleotide may be methylated to form 5-methylcytosine"
ccatctgagtaggtggcctaggctagtgtgctggctccaggcaggtttcttctctcttgtcgctctctctcttttgacccacattttctatcttgagatctaaactagttgctccaggtcct

SEQ ID NO: 28955 - DNA, 122 bp, Homo sapiens
  misc_feature (61)..(62): /note="This region represents a CpG dinucleotide"
  misc_feature (61)..(61): /note="Nucleotide may be methylated to form 5-methylcytosine"
gtagcagaaggagggagcaggagccgaccagacgtgcaagatgcatattgctgggaaggtcgggaaggatgcagagaggagccagggaagccacgctgctatttatcctctctccctctcgc

SEQ ID NO: 28956 - DNA, 122 bp, Homo sapiens
  misc_feature (61)..(62): /note="This region represents a CpG dinucleotide"
  misc_feature (61)..(61): /note="Nucleotide may be methylated to form 5-methylcytosine"
caagaattacaaaaatgtgacagacaaatacaaagtgagcacacgctgttggaaaaatggcgtgcaaagacttgcacaacacagggttgacataaatcttcaatatgttaaaaaaaaaaaac

SEQ ID NO: 28957 - DNA, 122 bp, Homo sapiens
  misc_feature (61)..(62): /note="This region represents a CpG dinucleotide"
  misc_feature (61)..(61): /note="Nucleotide may be methylated to form 5-methylcytosine"
ttgataactcttcttatcaacagcacaaactcataaggcagacaagaatttcctgttatacgtgtcataaacagtaaagttctgtgtggatgtgagcacgagcacagttaaatcatatcatt

SEQ ID NO: 28958 - DNA, 122 bp, Homo sapiens
  misc_feature (61)..(62): /note="This region represents a CpG dinucleotide"
  misc_feature (61)..(61): /note="Nucleotide may be methylated to form 5-methylcytosine"
tgttcagttgaaagccaagttattttgagctgagcaaaatgaggattcaaattacaggagcgcagagtaaacttttggcatattagcggacatcttggtaagtttctcaggacagtgttttt

SEQ ID NO: 28959 - DNA, 122 bp, Homo sapiens
  misc_feature (61)..(62): /note="This region represents a CpG dinucleotide"
  misc_feature (61)..(61): /note="Nucleotide may be methylated to form 5-methylcytosine"
ttttattggcctgttgtttgagggggcaggttataggcaagggatgaggattctgtcttacgtgaggcaattattagtgatattttatcacttgtcataatatgcactaacttgtttctctc

SEQ ID NO: 28960 - DNA, 122 bp, Homo sapiens
  misc_feature (61)..(62): /note="This region represents a CpG dinucleotide"
  misc_feature (61)..(61): /note="Nucleotide may be methylated to form 5-methylcytosine"
agctgagcttgagtcagctattctgttggagaatccctaggttacatcagagaagatagccgtgggctagtcacctctatgagctttgtcatggctataattttcatcaccagtcagtcctt

SEQ ID NO: 28961 - DNA, 122 bp, Homo sapiens
  misc_feature (61)..(62): /note="This region represents a CpG dinucleotide"
  misc_feature (61)..(61): /note="Nucleotide may be methylated to form 5-methylcytosine"
gtgaggtcagtgggtcacacccagggtagggctgaggtccatgccgcctgccatgccctccgacagtggctcttaatgcctgacttgctgatgcccagaacaaaggttcctaattcttttag

SEQ ID NO: 28962 - DNA, 122 bp, Homo sapiens
  misc_feature (61)..(62): /note="This region represents a CpG dinucleotide"
  misc_feature (61)..(61): /note="Nucleotide may be methylated to form 5-methylcytosine"
tctggttttggtagaaccaccctgcatagctgtgccacacagggagtttctctcctagctcgtgaccagcagtacactgttgttgcatgttagttttgctaggtttgtaatggaatgatggc

SEQ ID NO: 28963 - DNA, 122 bp, Homo sapiens
  misc_feature (61)..(62): /note="This region represents a CpG dinucleotide"
  misc_feature (61)..(61): /note="Nucleotide may be methylated to form 5-methylcytosine"
tctgactcggccttcagaatgtaccttcacttttgcaataaactgccttacacttatcttcgttaatgcatgtctcttgcttaaagtcttaaccaagaagacaagaaccgaggacacattcc

SEQ ID NO: 28964 - DNA, 122 bp, Homo sapiens
  misc_feature (61)..(62): /note="This region represents a CpG dinucleotide"
  misc_feature (61)..(61): /note="Nucleotide may be methylated to form 5-methylcytosine"
tctagtccatcactcaagcaattcagagtatgtaccttcaaaatgataaataagcctctacgtccacctatcctacaaaataagcccttgtaaaagaaatatcaagcaactaaaagagaagg

SEQ ID NO: 28965 - DNA, 122 bp, Homo sapiens
  misc_feature (61)..(62): /note="This region represents a CpG dinucleotide"
  misc_feature (61)..(61): /note="Nucleotide may be methylated to form 5-methylcytosine"
aaaaagacactcgtattgcttctttccaggttccaccctatggtggattcttctacatcacgcttggaattcattaactccataatcctgtttctgaggaaccataactttgatggactgga

SEQ ID NO: 28966 - DNA, 122 bp, Homo sapiens
  misc_feature (61)..(62): /note="This region represents a CpG dinucleotide"
  misc_feature (61)..(61): /note="Nucleotide may be methylated to form 5-methylcytosine"
ctctccctaaaagggtgggattggatttggaggtgggaggagaatctgcaatggagttaccgacaccatgtaaggaaaaccttggaggctgctattcccatttggagggatcagcaaaaagg

SEQ ID NO: 28967 - DNA, 122 bp, Homo sapiens
  misc_feature (61)..(62): /note="This region represents a CpG dinucleotide"
  misc_feature (61)..(61): /note="Nucleotide may be methylated to form 5-methylcytosine"
agtgaaaccaaggcacacactggtaaagtgatgcactcagggtaacttcatagtttctcacgtgttagaaatactctgtcccttcactgccctgggtgccaggcttataaatttagctccat

SEQ ID NO: 28968 - DNA, 122 bp, Homo sapiens
  misc_feature (61)..(62): /note="This region represents a CpG dinucleotide"
  misc_feature (61)..(61): /note="Nucleotide may be methylated to form 5-methylcytosine"
gcggagtttcaagtgacggagccacccctgggtctgttaccccagggaccaggctcagatcgtcaggtccgcccaccccaaacccagtctggggccgaagaagcccgggaagcccgtgtctg

SEQ ID NO: 28969 - DNA, 122 bp, Homo sapiens
  misc_feature (61)..(62): /note="This region represents a CpG dinucleotide"
  misc_feature (61)..(61): /note="Nucleotide may be methylated to form 5-methylcytosine"
gaaaattaggattcttaatggatttcttagctgagacgcctcaactttgccctgaaacagcgtcagcaccctggttttagatccaaatgttacttccaggtatcaccaataatcaaattaag

SEQ ID NO: 28970 - DNA, 122 bp, Homo sapiens
  misc_feature (61)..(62): /note="This region represents a CpG dinucleotide"
  misc_feature (61)..(61): /note="Nucleotide may be methylated to form 5-methylcytosine"
gagaacctgctagcacagagagagatagacagatgggggaagtgatggtgggaagggtggcggtgtggaatgggtctgagtgaactagcaggttcacaacaactattaatgatgactcttgt

SEQ ID NO: 28971 - DNA, 122 bp, Homo sapiens
  misc_feature (61)..(62): /note="This region represents a CpG dinucleotide"
  misc_feature (61)..(61): /note="Nucleotide may be methylated to form 5-methylcytosine"
ctttccaaaatgcagtgcacttctctggagttaattcaactatcagtaactgagaactttcggattcttcttgagagttgaaaggtgacaagtaaccttctgttcagttagctcgcaaaaga

SEQ ID NO: 28972 - DNA, 122 bp, Homo sapiens
  misc_feature (61)..(62): /note="This region represents a CpG dinucleotide"
  misc_feature (61)..(61): /note="Nucleotide may be methylated to form 5-methylcytosine"
ccaagctcatgagcaacagtgctgactcagtcctgcagcatcagttcagtcttggggtgtcgtcattctccaggacatcccaacgagggatatccagcagccttccttgagggtcccaccct

SEQ ID NO: 28973 - DNA, 122 bp, Homo sapiens
  misc_feature (61)..(62): /note="This region represents a CpG dinucleotide"
  misc_feature (61)..(61): /note="Nucleotide may be methylated to form 5-methylcytosine"
tgtgcctgcacccctgcaccagggcagctggcctgggcgaggcttggctggctcagggttcgcagggccagctctgggcctggcatagctccactccagccttgctcctgacaaaaaggcct

SEQ ID NO: 28974 - DNA, 122 bp, Homo sapiens
  misc_feature (61)..(62): /note="This region represents a CpG dinucleotide"
  misc_feature (61)..(61): /note="Nucleotide may be methylated to form 5-methylcytosine"
tatgtggctgtcaagcccgaaatatttactatctggccttactctaaaacattctttgaacgctgggactctgcattgctcaaagctatttaggaagtttgcttttgagagtaaagacagaa

SEQ ID NO: 28975 - DNA, 122 bp, Homo sapiens
  misc_feature (61)..(62): /note="This region represents a CpG dinucleotide"
  misc_feature (61)..(61): /note="Nucleotide may be methylated to form 5-methylcytosine"
ggcgaggctcacacgtgctgccaggtgacaaactgcttttgctaagcccacttggtttggcggctccctttaaatgaggccttctcaggaatacaaccccagggaacacatttcactggcct

SEQ ID NO: 28976 - DNA, 122 bp, Homo sapiens
  misc_feature (61)..(62): /note="This region represents a CpG dinucleotide"
  misc_feature (61)..(61): /note="Nucleotide may be methylated to form 5-methylcytosine"
ccgcctcccaggttcaagaaattctcttgcctcagccttctaagtagccaggcctacaggcgcgtgccaccacacccaactaatttttgtacttgtagtagagacagggtttcaccatgttg

SEQ ID NO: 28977 - DNA, 122 bp, Homo sapiens
  misc_feature (61)..(62): /note="This region represents a CpG dinucleotide"
  misc_feature (61)..(61): /note="Nucleotide may be methylated to form 5-methylcytosine"
aagagatggtaactcctgaaccagatctttggctgagacaatgagaggtgatgagagaggcgatgagccagatcttcggctaaggcgattagtcagaggcaagaagtccaggctggaagtat

SEQ ID NO: 28978 - DNA, 122 bp, Homo sapiens
  misc_feature (61)..(62): /note="This region represents a CpG dinucleotide"
  misc_feature (61)..(61): /note="Nucleotide may be methylated to form 5-methylcytosine"
ttgccctttggaacaactccttcaggaagctgaggcctgtgatttggtaacagacctgctcggtaggccatcttcacacacccctcaatcttgcagttctcttcccgtcataggcctgtgat

SEQ ID NO: 28979 - DNA, 122 bp, Homo sapiens
  misc_feature (61)..(62): /note="This region represents a CpG dinucleotide"
  misc_feature (61)..(61): /note="Nucleotide may be methylated to form 5-methylcytosine"
tttttctaatctgactctatcagttatgggaatgttccctcaattcttagtgctccaaaccggacttgctcttggcttgtatttgtccaaaatatttgtcttctctatgttttctacatgtt

SEQ ID NO: 28980 - DNA, 122 bp, Homo sapiens
  misc_feature (61)..(62): /note="This region represents a CpG dinucleotide"
  misc_feature (61)..(61): /note="Nucleotide may be methylated to form 5-methylcytosine"
ctcctatttattgcacacagctcaattcctgattcattcttgtcatgttggcatcctgtccgcttgcttcactgctttatccaaagggcagacatagccatctttcttcattactcacaaat

SEQ ID NO: 28981 - DNA, 122 bp, Homo sapiens
  misc_feature (61)..(62): /note="This region represents a CpG dinucleotide"
  misc_feature (61)..(61): /note="Nucleotide may be methylated to form 5-methylcytosine"
taacacactggatgaccctggacaagctactgaaacaattcaccaataggttaactcatccgtcaagaaagtaagtggtttctggctgggcgtggtggctcacacctgtaatcccagcactt

SEQ ID NO: 28982 - DNA, 122 bp, Homo sapiens
  misc_feature (61)..(62): /note="This region represents a CpG dinucleotide"
  misc_feature (61)..(61): /note="Nucleotide may be methylated to form 5-methylcytosine"
ggggagatggtgagaatcacttagttatcatttgcaaagcacaaggcataacgtctgctgcgtagtaaactctcaataaggattagtgatcattgttcccagtgaataacataatgggaacc

SEQ ID NO: 28983 - DNA, 122 bp, Homo sapiens
  misc_feature (61)..(62): /note="This region represents a CpG dinucleotide"
  misc_feature (61)..(61): /note="Nucleotide may be methylated to form 5-methylcytosine"
tattaggggtatttggtattatttggagttatgacattgcctaatagaacttctgctatacgacaagcaaaatcactttctgccttgtgcaataggctgctctctaactagtatctctgctc

SEQ ID NO: 28984 - DNA, 122 bp, Homo sapiens
  misc_feature (61)..(62): /note="This region represents a CpG dinucleotide"
  misc_feature (61)..(61): /note="Nucleotide may be methylated to form 5-methylcytosine"
tctcttttgcacgcatgtgtgtctcttcctcatatactgatttcagagctgcagcctaagcgtcttgtattgtgctggttatatttaaacaattcactgtgcgaggcaagtgcccaaaccaa

SEQ ID NO: 28985 - DNA, 122 bp, Homo sapiens
  misc_feature (61)..(62): /note="This region represents a CpG dinucleotide"
  misc_feature (61)..(61): /note="Nucleotide may be methylated to form 5-methylcytosine"
ggtgtcgtggttggcaggaagtgccacattcagggatattgacttctggctctttctccacgtgactatgagatgaagcaatttctgaagagggttaagataaaaaccttagatgtcatcca

SEQ ID NO: 28986 - DNA, 122 bp, Homo sapiens
  misc_feature (61)..(62): /note="This region represents a CpG dinucleotide"
  misc_feature (61)..(61): /note="Nucleotide may be methylated to form 5-methylcytosine"
tggaatcaaagacattttggaggtctctggtccatctgaaagggggatactgggttcacccgatcccacgctttgccttctagagcttgctgccctggacaccccccaccccattcccccac

SEQ ID NO: 28987 - DNA, 122 bp, Homo sapiens
  misc_feature (61)..(62): /note="This region represents a CpG dinucleotide"
  misc_feature (61)..(61): /note="Nucleotide may be methylated to form 5-methylcytosine"
aaaagctgccgaaaaggttaacaataacaactttcaagtgtaatagtgcaaattcccctgcgagatttactgcagagaaagattctttgaaatacagattttctttaaaaggattgatgtaa

SEQ ID NO: 28988 - DNA, 122 bp, Homo sapiens
  misc_feature (61)..(62): /note="This region represents a CpG dinucleotide"
  misc_feature (61)..(61): /note="Nucleotide may be methylated to form 5-methylcytosine"
gaataagaatgcaggagagaaaaggcccaaggattaaccccagaggcacttcaacatctccggtgggaaggtaaagagcttggactgaatcctgaagtgtagttctccaagtgtagttttcc

SEQ ID NO: 28989 - DNA, 122 bp, Homo sapiens
  misc_feature (61)..(62): /note="This region represents a CpG dinucleotide"
  misc_feature (61)..(61): /note="Nucleotide may be methylated to form 5-methylcytosine"
caaaaacaacccccaaaggtgtgttgggaggaccttttgtttcctccccggaagcgtgggcggcatgcacttcctggttgtctgtctgagagcacctgcctgaagaggatgctgaggagaga

SEQ ID NO: 28990 - DNA, 122 bp, Homo sapiens
  misc_feature (61)..(62): /note="This region represents a CpG dinucleotide"
  misc_feature (61)..(61): /note="Nucleotide may be methylated to form 5-methylcytosine"
agctgggggtagggtgtaaggaagaagagaaaggctgaggagagaagactgaacaacagacgtctgagagaacagggaggttttgagcatgcacatttacaaataatctttctctagtacaa

SEQ ID NO: 28991 - DNA, 122 bp, Homo sapiens
  misc_feature (61)..(62): /note="This region represents a CpG dinucleotide"
  misc_feature (61)..(61): /note="Nucleotide may be methylated to form 5-methylcytosine"
aataaaaggtcggaacatcataatcactgtcagactcaacttccatcattctcctccaggcgctatggagtctaatccaggcactttggaaggctgaggctggaggatcgattgaggccagg

SEQ ID NO: 28992 - DNA, 122 bp, Homo sapiens
  misc_feature (61)..(62): /note="This region represents a CpG dinucleotide"
  misc_feature (61)..(61): /note="Nucleotide may be methylated to form 5-methylcytosine"
tgtcaagtccctgctggtgcaggtttgtctggtagcaccagtgaggtggcccccacccatcgccatcccagaaaccctcccttggacacacctggaaggtgctaagtgcaccgggcagagga

SEQ ID NO: 28993 - DNA, 122 bp, Homo sapiens
  misc_feature (61)..(62): /note="This region represents a CpG dinucleotide"
  misc_feature (61)..(61): /note="Nucleotide may be methylated to form 5-methylcytosine"
acctgagagcttcgccctgctaggattagcgtctgtataaagagagacacctgagagcttcgcctacacgcttccccactgagggaagaccatgtgactatacaacaggaaggtagttgttt

SEQ ID NO: 28994 - DNA, 122 bp, Homo sapiens
  misc_feature (61)..(62): /note="This region represents a CpG dinucleotide"
  misc_feature (61)..(61): /note="Nucleotide may be methylated to form 5-methylcytosine"
gaccaatccctggggtttctggtcggcctgtggatgtgtcccggtcaggcctaggtcaggcgcctgacagcgtcacctgtggccactgagaatcatcctccttcaggagtcccagtcagtca

SEQ ID NO: 28995 - DNA, 122 bp, Homo sapiens
  misc_feature (61)..(62): /note="This region represents a CpG dinucleotide"
  misc_feature (61)..(61): /note="Nucleotide may be methylated to form 5-methylcytosine"
gtatgaatttacaaacaggacctgaccattaagagcctgccaccaccaatgacccagatgcggtaaagcttgcaaaaccttgacgccctttgatgctcacagcaactgaggtggcaggcaga

SEQ ID NO: 28996 - DNA, 122 bp, Homo sapiens
  misc_feature (61)..(62): /note="This region represents a CpG dinucleotide"
  misc_feature (61)..(61): /note="Nucleotide may be methylated to form 5-methylcytosine"
tagcataatcatcctatccatatagtattccagcaaattgcaatgactcatccaggcctccgctgagtttcctaagctcttgacaactttaagcacagaaacaagcccttcaaaacgccctg

SEQ ID NO: 28997 - DNA, 122 bp, Homo sapiens
  misc_feature (61)..(62): /note="This region represents a CpG dinucleotide"
  misc_feature (61)..(61): /note="Nucleotide may be methylated to form 5-methylcytosine"
cagtgtggtgctgcttccactgttgtagggtgggaccccaggtggcttgttctaattaagcgtcaacatgaatgatctgttctgtgctgtggttgagtcagaaagggaaagtcatctggcca

SEQ ID NO: 28998 - DNA, 122 bp, Homo sapiens
  misc_feature (61)..(62): /note="This region represents a CpG dinucleotide"
  misc_feature (61)..(61): /note="Nucleotide may be methylated to form 5-methylcytosine"
aattattagagagtcaagctatttcccaaactggctgaaccactgtactcccggtagcaacgtatgagaaactagttgctctacatcctcaccaaccatttttaattttagtcattttcgtg

SEQ ID NO: 28999 - DNA, 122 bp, Homo sapiens
  misc_feature (61)..(62): /note="This region represents a CpG dinucleotide"
  misc_feature (61)..(61): /note="Nucleotide may be methylated to form 5-methylcytosine"
cttttctctgcttgttgggagcacttccagcatcactagtggcactttttatggatcccacggtgttattcgaggtttctagtattgcactaaacacaatgaaaaatatgtgagagccatga

SEQ ID NO: 29000 - DNA, 122 bp, Homo sapiens
  misc_feature (61)..(62): /note="This region represents a CpG dinucleotide"
  misc_feature (61)..(61): /note="Nucleotide may be methylated to form 5-methylcytosine"
ctgttttctctttcattatttatcactctctaaccatctccagctgggtgagtaaacaggcgcattggcccataatgaggaacagactgctgccgtggggctgccggaggggcgcgtgtgtg
